United States Patent Application Publication US 2007/0061916 A1 - sequence listing, part 17

SEQ ID NO: 108751 - protein, 60 aa, Gossypium hirsutum
  Clone ID: LIB3829-005-Q6-K6-A1.pep
ICIIDDVTYITFQVFHGQPMQATVSAAPHPPTMRPRVRARRGQATDPHSIAERVSLIYYK

SEQ ID NO: 108752 - protein, 190 aa, Gossypium hirsutum
  unsure (1)..(190): unsure at all Xaa locations
  Clone ID: LIB3829-005-Q6-K6-A4.pep
VKKSRSGPQVFHLLFVDDCILFVKATERGASSVKQILQYEICSGQSVNYSKSTIXFSANTQEREKRMITKMIGVRSSTDPERYLGLPNLVGRRKKXSFHNLKDRVRVRVRIENWSIKYISXRRKEVFIKAILQSIPTYSMTCFLLPKSLCIESEGLIPKFWWQNTGARRAFTSVXWKDICSFKEEGGLGF

SEQ ID NO: 108753 - protein, 189 aa, Gossypium hirsutum
  unsure (1)..(189): unsure at all Xaa locations
  Clone ID: LIB3829-005-Q6-K6-B6.pep
GRNYKYIYNGSHSCFSFFVALNKVVNHGVXREVLNDTMNVVEEFFKMPMEEKASLYSEDPNKVCRLYTSNINYGTXKVSXWRDILKHHCHPLDDCIKLWPQKPTRYRDVIRTFSVEGKKLGLTILELLTEGLGLESGYFKKDLSEAMLLVANHYPPCPDPSLTLXLPKHCDPNLITILLQGHTFGLQVF

SEQ ID NO: 108754 - protein, 181 aa, Gossypium hirsutum
  unsure (1)..(181): unsure at all Xaa locations
  Clone ID: LIB3829-005-Q6-K6-C12.pep
TLSKDDLASRLTLTVDTATVEPLLLSDSFITXMDTNDYSVIPQQLKDQLSERYPGARRAYXKTGGDFPFLSRPDEVNLHLQLHLRQVGVEARPDLVQSIPKGGTGGSPSKESEKKKDPDDQPKDNGGNPESTSEESQLPPSSEIHSLDDQLLSDARICSMGHEDAIILMQSQYTVVNRILQ

SEQ ID NO: 108755 - protein, 198 aa, Gossypium hirsutum
  unsure (1)..(198): unsure at all Xaa locations
  Clone ID: LIB3829-005-Q6-K6-C2.pep
ILASXNWXSALRSXNATYSNYDENLKSGYCNRSTYKRLRSGRNFPFKKRKFLHYTSESNSDGGTIGEGISDLPEKNINGKASILYSKMHGVTGESSSLADQRKSFNSRDPHVKLRIKSFRVPELFIEIPESATVGSLKRTVKEAVTAILGGGLCVGVLLQGKKVRDDNKTLLQTGISRDNQMDSLGFSLEPNPSHTSP

SEQ ID NO: 108756 - protein, 110 aa, Gossypium hirsutum
  unsure (1)..(110): unsure at all Xaa locations
  Clone ID: LIB3829-005-Q6-K6-C4.pep
KKAFLKAGHFPLVKCSYLHPNVLGLGGEALGNDFNLLQFHKINSCSQGNCLMVVGKLSRLVSDKSNLXTXEDNPWRSFSFTGLPPMAENKFFTTRFERPQISSPQRDFDL

SEQ ID NO: 108757 - protein, 177 aa, Gossypium hirsutum
  Clone ID: LIB3829-005-Q6-K6-C5.pep
MSGRPDSGYLKYRWQPLNCQLPRFDGLVFLSKMRGKTVMFVGDSLGRNQFESLICMILAANPQTQTQMNRAMPLSTFKFLEYGVSISYFRAPFLVDVDVMQGKRIVKLDDIAGNGNAWRMADVLVFNTGHWWGHEGSLRGWDLIQSGGKYYQDMDRMVAMEKGLRTWANWVDSNVDI

SEQ ID NO: 108758 - protein, 187 aa, Gossypium hirsutum
  unsure (1)..(187): unsure at all Xaa locations
  Clone ID: LIB3829-005-Q6-K6-C9.pep
AQGDRRVDPTKHFKKQPGRPSLEHAASEFASDATPATGQENTLWSNHDMRRGPLASDKSNFADSSGKFYSSHNDVYSGSFTENKSDRNDEGSVLVGYMMKHGKKHFVLDENRRNTYNPSSAAREASVLNTFNGERKQLLTVGVYYEHGYTRSLARFAANLGPVAWKIASKRXEKCLPAGVNFGPGWV

SEQ ID NO: 108759 - protein, 80 aa, Gossypium hirsutum
  Clone ID: LIB3829-005-Q6-K6-D10.pep
MMPKPKALTAAQPMESKGPSEPEQLVESDERVDLDEDSDPEETMEEEVEYEEVEVEEEGEEEIEEEEEEEEDLDVENAWG

SEQ ID NO: 108760 - protein, 42 aa, Gossypium hirsutum
  unsure (1)..(42): unsure at all Xaa locations
  Clone ID: LIB3829-005-Q6-K6-D12.pep
SPWKCFQFFHSDKCYSTMTSSSAKLRSVILVVLXYECATDAE

SEQ ID NO: 108761 - protein, 176 aa, Gossypium hirsutum
  unsure (1)..(176): unsure at all Xaa locations
  Clone ID: LIB3829-005-Q6-K6-D7.pep
RCYVLVYEVPKMTSVPWNAVISCHGIHGHAEKALKLFREMREERVKPDHVTFVSLLSACSHSGLVEAGQWCFNVMREEYGIEPILKHYGCMVDMFGRAGHLEKAYNFIKDMPVKPDASVWGALLGACRIHGNIDLGAFASERLFEVDSENVGYYVLMSNIYANIXXWEGVDKVRTL

SEQ ID NO: 108762 - protein, 201 aa, Gossypium hirsutum
  unsure (1)..(201): unsure at all Xaa locations
  Clone ID: LIB3829-005-Q6-K6-F3.pep
PASGSGVFPQLQQVKYDCNKCGSILGPFFQNSYSEVKVGSCPECQSKXPFTVNVEQTVYRNYQKLTLQESPGTVPAGRLPRYKEVILLNDLIDCARPGEEIEVTGIYTNNFDMSLNTKNGFPVFATVVEANYVTKKQDLFSAYKLTQEDKEEIEKLAKDTQIGERIIKSIAPSIYGHEDIKTAIALAMFGGQEKXVEGKHR

SEQ ID NO: 108763 - protein, 91 aa, Gossypium hirsutum
  Clone ID: LIB3829-005-Q6-K6-G10.pep
KKKKKKKKKKKKKKKKKKNKKKKKGGAGFIWKRSITYRPPCLQTFFFFFFGGHLKFNSPGRLFSSGRGVEPLPVAPLISLACSTSFFRLLA

SEQ ID NO: 108764 - protein, 61 aa, Gossypium hirsutum
  Clone ID: LIB3829-005-Q6-N6-A1.pep
HRSYTVLRIVSCRHRYSSTFEGSKYQRGGNQVQLYELLDPLLKDDYMGSICFRISIYSCLF

SEQ ID NO: 108765 - protein, 126 aa, Gossypium hirsutum
  Clone ID: LIB3829-005-Q6-N6-A7.pep
CVQLVGSMSLAARDAAIKSFTEDPDCKIFLMSLKAGGVALNLTVASHVFLMDPWWNPAVERQAQDRIHRIGQCKPIRIVRFVIENTIEERILKLQEKKELVFEGTVGGSTEALGKLTEADMRFLFV

SEQ ID NO: 108766 - protein, 103 aa, Gossypium hirsutum
  Clone ID: LIB3829-005-Q6-N6-A9.pep
RPFKPPSFKVFKKNFFVFFPKKKTPRGGCLFLFFLKFHKGWVFFLFLKFFLGLGNGKGPGGGKIMGDLGSSCLKMPQWVLNKNFWVFWKFIKFFPLNPPFFSP

SEQ ID NO: 108767 - protein, 77 aa, Gossypium hirsutum
  Clone ID: LIB3829-005-Q6-N6-B4.pep
AFNFLFSYNLFLAATSNSHWLKREIKERIRQGERNREGGRDYIISSFFFAMETIVFIILYVILFLSTLLSYPFLRKQ

SEQ ID NO: 108768 - protein, 47 aa, Gossypium hirsutum
  Clone ID: LIB3829-005-Q6-N6-B6.pep
LTSSMKSESYSPFHTINIPYVWQTRIPYIITFIVLQIIFQTMITTDT

SEQ ID NO: 108769 - protein, 62 aa, Gossypium hirsutum
  Clone ID: LIB3829-005-Q6-N6-C12.pep
QNRYNTVNGKTRAAHQQFACMNNNGRRKCYYVLCYLHQGGGGSKHYLEERTMTQHKWEAKRK

SEQ ID NO: 108770 - protein, 141 aa, Gossypium hirsutum
  Clone ID: LIB3829-005-Q6-N6-C5.pep
GLRTWANWVDSNVDITRTRVFFQSASPDHYNPNEWSAAATAMTAKNCYGETEPMKGTTYTSAYADQMGVVNEVIREMHVPTYLMDITMLSELRKDGHPSIYRGDFSPSQRANPQKSADCSHWCLPGLPDTWNELFYTVLFY

SEQ ID NO: 108771 - protein, 76 aa, Gossypium hirsutum
  Clone ID: LIB3829-005-Q6-N6-C6.pep
GHGGKVGGKKKPGGGEKIGPNPQNRGTPGRTGFGVKREIKFKVWGKANRGMLAKIEKKKLEKKRKFPTKYGLPGTN

SEQ ID NO: 108772 - protein, 52 aa, Gossypium hirsutum
  Clone ID: LIB3829-005-Q6-N6-C9.pep
SMLSPQQKPDSSLSPKQKPDSVPPDLNIRFQSPGSPSSSRADTAHPDLALQL

SEQ ID NO: 108773 - protein, 78 aa, Gossypium hirsutum
  unsure (1)..(78): unsure at all Xaa locations
  Clone ID: LIB3829-005-Q6-N6-D10.pep
VQPYGIAGLAQPLIYASGPSPPGMSMMPMLLPDGRIAYVLQQPEAQLXSPPPHQRNSKDSGSSNRGKHSNDGRWYRPY

SEQ ID NO: 108774 - protein, 89 aa, Gossypium hirsutum
  Clone ID: LIB3829-005-Q6-N6-D12.pep
GVGFFFFFFFFFFFFFFFFFFFFFLTNKHRGFFRGSKYFFVQHFKIKKGFLLLGGFFNTKFIHTLEHGRGRVIVNGGGSQPPFCPFLGN

SEQ ID NO: 108775 - protein, 84 aa, Gossypium hirsutum
  Clone ID: LIB3829-005-Q6-N6-D7.pep
TILPARVALYQTTRCTYSNLLYRESPSSLIRTFFVIMKMGLAPLYAQPVEPELGLITGEPTFSMMYPFKSANRYDLIEKLIFLP

SEQ ID NO: 108776 - protein, 98 aa, Gossypium hirsutum
  Clone ID: LIB3829-005-Q6-N6-F10.pep
SIGNVPQTQCQHVSTKIKLRNTQYSVKQATAHKTTWRDDNNPIHYICVVGEMCVWASCLLPHAIQRYGIRQMPSVRRAFRWSLQVSVTQSKARLHRRA

SEQ ID NO: 108777 - protein, 105 aa, Gossypium hirsutum
  Clone ID: LIB3829-005-Q6-N6-F11.pep
NGGGHCNLELYPEFIRHLKKFVLSLHKSKAATNGSEKIAVNSDNQTKPPDGGTSDTFKLDADLPEVSRNSLDSRLEKSKKSNKPEKSRMSTDRVDRFRRKKGLVW

SEQ ID NO: 108778 - protein, 136 aa, Gossypium hirsutum
  Clone ID: LIB3829-005-Q6-N6-G8.pep
KQTRGLKPPGGAPPPKPVFLNGGPLFRFGFAISPHPEWGLSKPKFARAPSFKQAPSRGKKNKREKTLFLRGRPPATAPNAFRKGPSPPRLGLIFPPRPRFFSRTPIPRTRRGMALSPAIGALAQRGAGVLKGVGEP

SEQ ID NO: 108779 - protein, 168 aa, Gossypium hirsutum
  Clone ID: LIB3829-005-Q6-N6-H9.pep
FFFFFFFFFFFFFFFFFFFFFFFFFFFFFFFKKNGPFLKKTPPFWGGFKKLFGPFLRKKRDPNFAKKQRGGGKQGPKALIFPNPETPGVQKLKLALKGGGKNILKKNLRGGALKHSFGKHFGKGDLLNPERDFLTPNKETLPLNEKANGLALAWKTKWGESLLVYGDP

SEQ ID NO: 108780 - protein, 65 aa, Gossypium hirsutum
  Clone ID: LIB3829-006-Q6-K6-A11.pep
VVQILLKTLLHLVLKPQCMLQKQQSPPVLLPIHHTCTGCSGFSLMHPSLIWYLPPASTHINAELV

SEQ ID NO: 108781 - protein, 62 aa, Gossypium hirsutum
  Clone ID: LIB3829-006-Q6-K6-A4.pep
GAKNRKKTRRRTPPHLEDNKRNATRAKGNGVNRQAKTALKETTIKTASQGPTAAPTKAETNT

SEQ ID NO: 108782 - protein, 64 aa, Gossypium hirsutum
  unsure (1)..(64): unsure at all Xaa locations
  Clone ID: LIB3829-006-Q6-K6-A8.pep
EKLLVARIALLCTAKLPKXRPSMRDVITMLVEAKPRRKSSSNNGGNASNKEIPVFSTSPVNGHV

SEQ ID NO: 108783 - protein, 196 aa, Gossypium hirsutum
  Clone ID: LIB3829-006-Q6-K6-A9.pep
LMQFLWVSKSHVFQLEEYPLYGNRSDEVSCVEHLCEQLCYHLDIASFVACVNSGQPWSSKFSLLLSGHENIVSGSEDAKLDTFVENFVLERLSVQSPLRVLFDAVPSIKFQDAIELISMQPVASTLEGWKRVEDIELMHMRYALESTVLALGAMESSMTGEKETHQVALCHLQDLKNHLAGIKNIPRRILMVNVII

SEQ ID NO: 108784 - protein, 210 aa, Gossypium hirsutum
  Clone ID: LIB3829-006-Q6-K6-C2.pep
GKDSLCKRVSLVSETWSTLKNSFPAIDEAITKMQSKLRDKLDHQHNRDVSNSGTAFSHEISPIETTRFDGKNYHCRAEHMELFLKQLLIAYVLTDPCPSLNISSEATSEELAQAKVAEKKWMNDDYLCHHCILSALSNNLYYQFPKKAKTAKELWEELKLVYLYEEFGTKRAQVRKYIEFQIVDERPIVEQMQELNIIADSIVATGIMGD

SEQ ID NO: 108785 - protein, 61 aa, Gossypium hirsutum
  unsure (1)..(61): unsure at all Xaa locations
  Clone ID: LIB3829-006-Q6-K6-C5.pep
RITLGACKILAXKMPSLNLEIINESEQLEFSLDDRLLVDKMYLYRTLVGHRKDKPEYVLLL

SEQ ID NO: 108786 - protein, 126 aa, Gossypium hirsutum
  unsure (1)..(126): unsure at all Xaa locations
  Clone ID: LIB3829-006-Q6-K6-D1.pep
MHKKMAFSFPDEVLEHVFSFIQSDKDRNAVSMVCKSWYEIERWCRRKVFVGNCYAVSPRMVIRRFPEFRSIELKGKPHFADFNLVPDGWGGYVFPWIAEMAGAYPWLEEIRLXXMVVTDESLELIA

SEQ ID NO: 108787 - protein, 185 aa, Gossypium hirsutum
  unsure (1)..(185): unsure at all Xaa locations
  Clone ID: LIB3829-006-Q6-K6-D8.pep
MSLSELRLLSAFLAMXXTDSLLCVARECGGGKLTAKVQSFIWDHCLTKAVGKGYESYSKKFVKKLITEIESNHGNVLDELYEQYASYMISFKDDNPVKENERVCKCISFLFPDCFKLSICPKSRKLVVPLQCSLNMLEGDTGCSVWPSSLFLSELILSYPHIFSGKSCFEVGSGVGLVGICLAHV

SEQ ID NO: 108788 - protein, 98 aa, Gossypium hirsutum
  Clone ID: LIB3829-006-Q6-K6-E3.pep
FIARFTSVMDSENILSSVGLKVAHQNGVYPQLRVCGDDSSSDNANGSVEETIETYLQNGMNDNVGTGEAGEDSDDFVESNALIDSEEGEIEDNMKQSK

SEQ ID NO: 108789 - protein, 152 aa, Gossypium hirsutum
  Clone ID: LIB3829-006-Q6-K6-H1.pep
MREGCGFSFPEQRFDWRSHDLSSLAAPHPLVQQNTNPQLVNSGIDMVSVPRTLPDYANPGIVPQLQVGQVNEPCGWFYCSPHYWQGLVPASTNPYEYHNEKIVSKAGSGCAQKRFLVFDQSGDQTTMIFSSSFGLLSNAPLWVQKLLLLVTL

SEQ ID NO: 108790 - protein, 187 aa, Gossypium hirsutum
  unsure (1)..(187): unsure at all Xaa locations
  Clone ID: LIB3829-006-Q6-K6-H6.pep
MEIEEVNNYESLPLLSLNHVSLLCRSVWDSMRFYKKXLGFVPIKRPSSFKFNFNGAWLYNYGIGIHLIENPLIDDFDTIIEPRPINPKDNHISFQCRDVEIVKGRLEDMGMKYVTAVVEDEGNTVDQVFFHDPDGYMIELCNCENIPILPLSACLFKPRMSSFSRAVFGPAKCGLVENAMMESLSMM

SEQ ID NO: 108791 - protein, 95 aa, Gossypium hirsutum
  Clone ID: LIB3829-006-Q6-N6-A8.pep
KKSWVFQELIYRGLLLQIPLTMGGNNFGGLGVNLLAWPGRNPKLGLSGNFLNNNLNQGLPALTKNNAPSREEFCLVLAQKTKRGGAKRGPLQGMG

SEQ ID NO: 108792 - protein, 113 aa, Gossypium hirsutum
  Clone ID: LIB3829-006-Q6-N6-A9.pep
FKQSVECGSEHIDLTIYEVGNKMAISFTGLLLDIVRHSLPSSTAEEEHASTDGLSMSGRQALEWRISMGKRFIEDWEWRLSILQRLLPLSERPWSWKEALTILRAAPSKLLSL

SEQ ID NO: 108793 - protein, 115 aa, Gossypium hirsutum
  unsure (1)..(115): unsure at all Xaa locations
  Clone ID: LIB3829-006-Q6-N6-C10.pep
SVRALLPGGSHGSSRSTTTNTEEDWDSVPTAEDIKALKGELTTLRLXRRNKQKWHGQNRHRKGGGEXMKGLAMSKIFSKLKSSKERNGEISSSDTSESPEETKSTPSVSRKHSLS

SEQ ID NO: 108794 - protein, 116 aa, Gossypium hirsutum
  Clone ID: LIB3829-006-Q6-N6-C2.pep
QRTRICNMLTKLKPFTKCSTCIEWACRIKLKRFSVYYLIQRNRRTELPKQHPFQLTIHYYQSCLPLQQQVLDNSNHFDSHSQVFRFFYYGRTWKYAPFSHNSYIGWAYHAFVILVF

SEQ ID NO: 108795 - protein, 79 aa, Gossypium hirsutum
  Clone ID: LIB3829-006-Q6-N6-C5.pep
KSQNENGGPKIRPLQKQPIPRVIFPMPPQGPKQKHFGYQKPFIRGKSPGATFGKEPQKRVGIFFGRILQAPGGTSPGPG

SEQ ID NO: 108796 - protein, 117 aa, Gossypium hirsutum
  unsure (1)..(117): unsure at all Xaa locations
  Clone ID: LIB3829-006-Q6-N6-D1.pep
SDLGLHHVLSGCXSFRKLEIXDCPFGDKALLANAAXLXXXRSLWMSSCAVSFAACKLLGQKMPRLNVEVIDERGPPDSRPENCPVDKLYIYRSIAGPRFDMPPFVWTMDEDSGLRLS

SEQ ID NO: 108797 - protein, 153 aa, Gossypium hirsutum
  Clone ID: LIB3829-006-Q6-N6-D8.pep
SASEKELQNFMPEIILGADVIYDPSCLPHLVKVLAILSNKKKSYIENREGSIPNSFPGDGKVNDAHDLDASSFHAQRINTSEVNNAVDLVSRADPVAYIASVIRNADTFDRFLALADQADLRIKDLTSTLRPFDLLPYMKSYDRSSIRLFTVT

SEQ ID NO: 108798 - protein, 79 aa, Gossypium hirsutum
  Clone ID: LIB3829-006-Q6-N6-E3.pep
RCLKTEIINESSTKNFTSWVNVAFYIQQLWLFRVSLAKVAGLVVRIPAFLFEPLYVNPPSPSCPPNFRKFWSLLLFEDP

SEQ ID NO: 108799 - protein, 63 aa, Gossypium hirsutum
  Clone ID: LIB3829-006-Q6-N6-F1.pep
FFFFFFFFFFFFFFFFFFFFFFFFFFFFFFFPGKKHKVKMGKGQNQFFPQKKKGGFPGTHLFP

SEQ ID NO: 108800 - protein, 99 aa, Gossypium hirsutum
  Clone ID: LIB3829-006-Q6-N6-F10.pep
SFRQVVPEYGFTIDAARFGNMGRFINHSCSPNLYAQNVLYDHDDKRIPHIMLFAAENIPPLQELTYHYNYMIDQVHDESGDIRKKVCCCGSSKCTGRLY

SEQ ID NO: 108801 - protein, 103 aa, Gossypium hirsutum
  Clone ID: LIB3829-006-Q6-N6-F6.pep
PGHGGSTSPTSLNLRASAVLPSLQCILQQNTMQREEIIRLIKYLEQSSGKLGDLSEVGTNDLLQIPPSFAREKELQSQVLQLQQSIGNLVEELQRQKMKNIQN

SEQ ID NO: 108802 - protein, 71 aa, Gossypium hirsutum
  Clone ID: LIB3829-006-Q6-N6-F8.pep
PDSIFLFDNFFYASILENQQGVTNIVRGCFTKITILIVICWFSLVPNLCCFISLLLITDLLELLKMLKVGM

SEQ ID NO: 108803 - protein, 89 aa, Gossypium hirsutum
  Clone ID: LIB3829-006-Q6-N6-G3.pep
EKQEKQAQKTAENKRKREAAFVPPKEPVKQDSNKSENKEEDVAALAKSSKQKAKEFGKQKSLQNINAEEYISAPAAEQPSKRKRKSKHT

SEQ ID NO: 108804 - protein, 78 aa, Gossypium hirsutum
  Clone ID: LIB3829-006-Q6-N6-G7.pep
CSTCRTYASSPGCIWLIIHLRLLLCINYPAEAAIILSFGNSLINLHFAGILFFFSAKTGVFNLEVLMLKYIWPCVQGI

SEQ ID NO: 108805 - protein, 64 aa, Gossypium hirsutum
  Clone ID: LIB3829-006-Q6-N6-H4.pep
LSIRNMIAIDRKHYGMLTCAVPAYKECRVHKHSYSPCRTIACIHSVMYNVRDRGLSGDKIVKLN

SEQ ID NO: 108806 - protein, 48 aa, Gossypium hirsutum
  Clone ID: LIB3829-006-Q6-N6-H6.pep
YIHKPHLYIYICIHTYIYMLHWVHNLIEKTITNTIFFIKTKQNRVILV

SEQ ID NO: 108807 - protein, 154 aa, Gossypium hirsutum
  unsure (1)..(154): unsure at all Xaa locations
  Clone ID: LIB3829-007-Q6-K6-A10.pep
HFPLPFFKKRXNLWRAATGQDPNPDDYKGVEFWTNPERAGWLTKQGDYIKTWRRRWFILKQGKLLWFKDPASVSRRSSPRGVVSVGSCLTVKGAEDIVNKAFAFELSTRDSTMYFIADTEKEKEDWINSIGRSIVQHSRSVTDSEIVDYDSKSR

SEQ ID NO: 108808 - protein, 171 aa, Gossypium hirsutum
  unsure (1)..(171): unsure at all Xaa locations
  Clone ID: LIB3829-007-Q6-K6-A2.pep
MGLLRAAGVVYKPVEQLDLGPDSNEIYVEADIKAPRMGGLLAKIFAWILESRIFGALAFYILKRLNRVHKFISNATVEEPPMFVPLHPYVDLDEQEVIEIDSDASPAERVQQAMNCLPLTSENSLDAFKFSCFRRWTIADYSRAYRNGEITPLKVAEAVYIXLFMNLPVVL

SEQ ID NO: 108809 - protein, 143 aa, Gossypium hirsutum
  unsure (1)..(143): unsure at all Xaa locations
  Clone ID: LIB3829-007-Q6-K6-A3.pep
IRFVSPYFVTPLXEKIFSSYSKRSCIRKLKLIDCTGLTSLRVVHALPNLGKLEIFRCCSLREIRFSYRDEFHNLRQVHVGVCPLLPNLNCLAYARNLEILTILDCQSMKQVISEEEIAGDGQDTSEGRVLFKVFPKLKMLSLT

SEQ ID NO: 108810 - protein, 88 aa, Gossypium hirsutum
  Clone ID: LIB3829-007-Q6-K6-B10.pep
NTFFPIKKNSREKTMADQLTDDQISVFMEAFSLFDLGGHGCITLFGSSLSVLPSLFWLCAGPRGAPFSPAFSSWSWVRRCCVSSCCAG

SEQ ID NO: 108811 - protein, 107 aa, Gossypium hirsutum
  unsure (1)..(107): unsure at all Xaa locations
  Clone ID: LIB3829-007-Q6-K6-C7.pep
MLGLCGLGYWVQGFRCFPWLALNFHMAYNLNLNPSTLQLVQNSGNLPMVAKPLFGILSDALYIGGAHRIPYIXALEVLSWGQLALFPVAGQALPALMACVLLSNTGA

SEQ ID NO: 108812 - protein, 97 aa, Gossypium hirsutum
  Clone ID: LIB3829-007-Q6-K6-D7.pep
CLVHLVSSSGIKIVVEKENMEELSARDRLLCTTCQMTVFWIQSQLKQKGTKDTVLNYVNELCQSLPSPMGESVIDCARISLMPDITFIIGDKPFKLT

SEQ ID NO: 108813 - protein, 188 aa, Gossypium hirsutum
  unsure (1)..(188): unsure at all Xaa locations
  Clone ID: LIB3829-007-Q6-K6-D9.pep
SCLLTAFKETELNDPTHAFSFIFFLTNCLSLXKHIPTTLQGPFHPITIHFDPSLRRGSDDIPMDDPRLKKNVTSMFPEQIALALSTPTSMWVSWVTGDAQIGPNVTALDPTSVASEVWYGKESGKYSSKKRGNATVYSQLYPFEGLFNYTSAIIHHVRIDGLEPETKYYYRCGDSSLPAMSEEHVFET

SEQ ID NO: 108814 - protein, 46 aa, Gossypium hirsutum
  Clone ID: LIB3829-007-Q6-K6-E1.pep
YSRKFSSRFCVTAFLKNTCVEVALFHGNIRGVMLSQATYGDIMKIS

SEQ ID NO: 108815 - protein, 44 aa, Gossypium hirsutum
  unsure (1)..(44): unsure at all Xaa locations
  Clone ID: LIB3829-007-Q6-K6-G12.pep
SNIKSNDYAYPFNPLHLNLKFRLQYDFNFFXILNSLYQIKLSPC

SEQ ID NO: 108816 - protein, 58 aa, Gossypium hirsutum
  unsure (1)..(58): unsure at all Xaa locations
  Clone ID: LIB3829-007-Q6-K6-G8.pep
LSNYXEKXHEKGSIYLFQTHTHFRHLHPSPSNIIICCRLFCNYMFPLYVISTTTLWLK

SEQ ID NO: 108817 - protein, 168 aa, Gossypium hirsutum
  Clone ID: LIB3829-007-Q6-K6-H12.pep
GFIRGYSQDLSLCHEKMRVSSRLLPETCWNPPDLGVIKINFNANFQCDSRSSTSAVIARNYKGDFVGAETYLFSDMVDAFVAEARVYERALLFAINMGFRHLVVEGDSLTVIKKLFVPRLVNSVAQTLAMECRRRRHSGFWIDEVPDSVKMLVTKDQTVWAQRHHGSS

SEQ ID NO: 108818 - protein, 188 aa, Gossypium hirsutum
  unsure (1)..(188): unsure at all Xaa locations
  Clone ID: LIB3829-007-Q6-K6-H9.pep
GYLFTNADXVHAVKALAXLGLGILLQGLIXMSTLTPTHKSTGSDGEYDIEXWDHALLHLMCPSSPEIPDIMGHFADLKPGPSATXFPSTPIVCTPQYSAIEXALKIAKINPQRTLFFDDSVRNIQTXKCGDLYTALRPNGAHYALESIHNIKHALPQLWETDMKSKGRYSGQVTVDDTIDSLYSMLFI

SEQ ID NO: 108819 - protein, 79 aa, Gossypium hirsutum
  Clone ID: LIB3829-007-Q6-N6-A2.pep
LDYVNGGTIIRYQIAGNFLGLPAITVPVGYDKAGLPIGLQFIGKPWSEPTLMHLAFAMQALCITDYRKPKVFYDILGKK

SEQ ID NO: 108820 - protein, 68 aa, Gossypium hirsutum
  Clone ID: LIB3829-007-Q6-N6-A3.pep
GLIVGGPRMGREHGSHHMTMSPIRFSVVNKLHTLTFGFAFVYGILHYPYRLVNGVAHRLRPLPPQETH

SEQ ID NO: 108821 - protein, 117 aa, Gossypium hirsutum
  unsure (1)..(117): unsure at all Xaa locations
  Clone ID: LIB3829-007-Q6-N6-C10.pep
SLPQVDAVAXFYGAPSPELGAPASAKAPVQAHFGDLDTFVGFSDVPPAKPLEENLKDSNTPYEVHIYPGNAHAPHARXPPDGIKRRKRMGMXDEDEAAAPLAWPRLDSWMRSFSLSY

SEQ ID NO: 108822 - protein, 70 aa, Gossypium hirsutum
  Clone ID: LIB3829-007-Q6-N6-D10.pep
FPPFLPPLDVSPLLPFPLLGPPGPIFNPRKGMFFFPAPKRELVKKIITPFLAFDYLFCPSKTFFPHFPRG

SEQ ID NO: 108823 - protein, 74 aa, Gossypium hirsutum
  Clone ID: LIB3829-007-Q6-N6-D11.pep
IMVIAIKYEHTILCSPLERNLFLVELLPHILSRKHLLGRKKGPCDTGNILHPLEYFAMDDECSYFAPTSNRPHF

SEQ ID NO: 108824 - protein, 125 aa, Gossypium hirsutum
  Clone ID: LIB3829-007-Q6-N6-D9.pep
ITVGDGGNIEKVDVDHADEPGKCPSQGDNMPEIGGVCHLNFSSGPAKGNFCWDRQPEWSAYRESSFGHGILEVLNSTYALWSWHRNQDTYKEDSPGDQIYIVRQPDICSPSTSLKVISHFNIYSH

SEQ ID NO: 108825 - protein, 93 aa, Gossypium hirsutum
  Clone ID: LIB3829-007-Q6-N6-E1.pep
SGISLTEVFILKGSWLFFPLQKQAKGVCMLNQRGLWAICWKLYPLRGSRENVGHQLLWHCWVIPSIQAVLVQSELHRFLTKRRCWLLGAWHIT

SEQ ID NO: 108826 - protein, 125 aa, Gossypium hirsutum
  Clone ID: LIB3829-007-Q6-N6-E6.pep
KKIVKGELADVVNIKLAKVGVLGALEIIDLARASGLDLMIGGMVETRLAMGFAGHLAAGLGCFKFVDLDTPLLLSEDPVLEGYEEVIYIWLAGECWNSESDWSVKVARQTHPPGKSSECVQFRCL

SEQ ID NO: 108827 - protein, 81 aa, Gossypium hirsutum
  Clone ID: LIB3829-007-Q6-N6-E8.pep
GFVNPSRQNIVDTKCALDASGRQLLATSGSVRAPIYQVQALSNGFKTLPHSAAITTVDWHPSLPIFLSGSADNSVGVPSIL

SEQ ID NO: 108828 - protein, 62 aa, Gossypium hirsutum
  Clone ID: LIB3829-007-Q6-N6-F10.pep
PLYGGADFHASPPRLLYTKSGTYSSTFVSMAWILGPPKGHRKLKALKPDGVEEESKDHTPRR

SEQ ID NO: 108829 - protein, 73 aa, Gossypium hirsutum
  Clone ID: LIB3829-007-Q6-N6-G6.pep
GPLIKIRACYKLSEPGLKERPPVPQAKMGPRANPAFDPKKVGAPKTPPKRVGAQKKSPPPNPKQPKSLKSPAA

SEQ ID NO: 108830 - protein, 99 aa, Gossypium hirsutum
  Clone ID: LIB3829-007-Q6-N6-G9.pep
HTAPHARFRREGNDLHTTVTITLVQALVGFDKPIKPLDDHLVEIGSKGIPKPKEVRKFKGEGMPLHFSHKKGDLFVPYEVLFPPSLGEDQKAKIKSILG

SEQ ID NO: 108831 - protein, 76 aa, Gossypium hirsutum
  unsure (1)..(76): unsure at all Xaa locations
  Clone ID: LIB3829-007-Q6-N6-H9.pep
LCTPIVWNPXESPIDQALKIAGITPQRPLFFDDSVRHTEVGKWVVSLTVLTLKGADYALERIHPITQASPYLWDTP

SEQ ID NO: 108832 - protein, 196 aa, Gossypium hirsutum
  unsure (1)..(196): unsure at all Xaa locations
  Clone ID: LIB3829-008-Q6-K6-A11.pep
RPSVLFTADCSCLWSVRLGLASKQRLASRNRRCLIIRSAATKPAKSPAEEDWKVKRELLLEXRVGGGDAKEAFRLQKENNFVILDVRPEAEFKEAHPAGAVNIQIYRLIKEWTAWDIARRAAFAFFGIFSGTEENPEFMQSRTXVESNFGKDAKIIVACTTGGTMKPSQNLPEGQQSRSLIAAFLLVLNGYKNVFH

SEQ ID NO: 108833 - protein, 191 aa, Gossypium hirsutum
  unsure (1)..(191): unsure at all Xaa locations
  Clone ID: LIB3829-008-Q6-K6-A3.pep
XSXDLSLALPRVSLSLTASNALQNGDPSQHRSRPSRSVQSLAPSTNNTQTTCSNDFTAASLSYSYSVPYSHNPSCSLTRNSTENYEFSVGKDDQIWCGGEGTNGSVHSRFRPIGDGVALAGAGAGAGFSMMQVNRHVNKDSCTSLHRTSSSDNHSFFPSELLAKPRIDNHSGDSRRKDSENWRVLESMDGG

SEQ ID NO: 108834 - protein, 198 aa, Gossypium hirsutum
  Clone ID: LIB3829-008-Q6-K6-B10.pep
GRVGGRVGGRVGGRVGAEMDGDDRSPSVVTYNILIGSLALHGRTYHAMDVLDEMIRGRFKVSATSYNPIIAQLCQEEKVDLVVKCLDQMIYRRCKPNEGTYNAIAVLCEQGMVQEAFSIFQSLASKQSSSPNDFYKSVISSLCRKGNTYPAFQLLYEMTKSGFTPDSYTYSSLIRGLCLEGMLQAAMQIFIVMEESNF

SEQ ID NO: 108835 - protein, 141 aa, Gossypium hirsutum
  unsure (1)..(141): unsure at all Xaa locations
  Clone ID: LIB3829-008-Q6-K6-B3.pep
YTVVCYGECKGYTXQIPLLLGDQTEMILDSVGNGANDXKPGRSCGYTILTGNGKXCRHWRESKXSNNMCDQLRINCXRVLLLADXKTIIYIHGNPMYQLCVNXTFSQYTVTHVGQNNTRSSSTNTFDKLCPIXCGICTGFG

SEQ ID NO: 108836 - protein, 34 aa, Gossypium hirsutum
  Clone ID: LIB3829-008-Q6-K6-B5.pep
PLLVPGIGICFIYLLDREHSGPHFRIPRSLKEIK

SEQ ID NO: 108837 - protein, 192 aa, Gossypium hirsutum
  Clone ID: LIB3829-008-Q6-K6-C1.pep
MLPSLLKKKRRRKKKKKMKNITRDTKCVPVIIREDLRKDSRGSHREEITPPRTPENNNVDHQTPPMPEAKNVAWDYFFMVDDNMPGPSLDLHDDNDEESTNPNVDALENNVSGVGHVEVDSEIEPKTPERPDKVAMAAEADDKQEVHIEHSKTAPADFRRMVKAVSGVNLMQVLNEIDDHFLKGSESAQEVS

SEQ ID NO: 108838 - protein, 170 aa, Gossypium hirsutum
  Clone ID: LIB3829-008-Q6-K6-C2.pep
LLNQENGQVFSMERGTGEESYATNSKLQSTCLSLSMPVLKQAVLSFCCTDLPETITIADLGCASGPNTFIAVSEIISIMYKNCCELGRSPLEFRVFFNDLPGNDFNTIFQSLPAFQEKLQQENGPKFGPFFTAGVPGSFYGRLFPSKTLHIVHSSSSIHWLSQVPPELVD

SEQ ID NO: 108839 - protein, 81 aa, Gossypium hirsutum
  Clone ID: LIB3829-008-Q6-K6-C6.pep
WMYRAETAIELGTKMARRLCLEHKEAFYNHTSKEPICYKMIGAQLNYTLANRCSTFCTILLFAKNYILVQGLKLTHPCDSM

SEQ ID NO: 108840 - protein, 187 aa, Gossypium hirsutum
  unsure (1)..(187): unsure at all Xaa locations
  Clone ID: LIB3829-008-Q6-K6-D11.pep
SVQRHVTLRIHASEEXALLDLLSFMYSNTLSTTTPTALLDVLMAADKFEVASCMRYCSRLLRNLPMTCESALLYLDLPSSVLMADAVQPLTDAAKQFLAVRYKDITKFQEEVLNLPLTGIEAVFSSDDLQVASEDAVYDFVLKWARTHYPKLEERRGIFATRLSRVMRFPYMTCRKLKKVLTCIDFD

SEQ ID NO: 108841 - protein, 189 aa, Gossypium hirsutum
  unsure (1)..(189): unsure at all Xaa locations
  Clone ID: LIB3829-008-Q6-K6-E3.pep
RPRGKWPSNFTYYPGLKXSKPVNSNESSTGCGCHGGCLAGNSSCPCIQXNGGNLPYTTNGVLVSQKPLIHECGSSCICPPNCKNRVCQSGLKIRLEVFKTKDKGWGLRSWDPIRSGAFICEYGGEVTDITSAEELRCVNDDDYIFYATRTNQSGEGFLNASNETLKIPFPLIINAKHAGNVARFMNHSC

SEQ ID NO: 108842 - protein, 62 aa, Gossypium hirsutum
  Clone ID: LIB3829-008-Q6-K6-E4.pep
QASPPLRSGTEMIDAHCVEATHPCLFCLYDIGRVHPRKQQISRVLGGQCAHTDSRVVKNPCT

SEQ ID NO: 108843 - protein, 185 aa, Gossypium hirsutum
  unsure (1)..(185): unsure at all Xaa locations
  Clone ID: LIB3829-008-Q6-K6-E5.pep
MSPATAKPKSLVSAIIPLQRDAEVPSHVLMGIRAGADAVPLSPLGESCVRMDLTAIHEVLENLGYKDDEGTATELSFQMWTNQMQETLTSKKXGDVAFRHKDFTAAIECYSQFIDVGTMVSPTVYARRSLSYLMSDMPQEALNDAMQAQIVSPVWHIASYLQAAALFALGKNDEAQTSLREGTEL

SEQ ID NO: 108844 - protein, 62 aa, Gossypium hirsutum
  Clone ID: LIB3829-008-Q6-K6-F12.pep
RSRSRGRTRGRTRGLHLRKRHLHCYFPKVIYYHILASILTKQFRVKPGSLVPTYFENSLVLC

SEQ ID NO: 108845 - protein, 77 aa, Gossypium hirsutum
  Clone ID: LIB3829-008-Q6-K6-F6.pep
FGGPKKKIFLFHPRVVKFGSLKRAPLFFFFFFFFFFFFFFFFFFFFFFFFFFFFFFFFFFFFFFSQNKSLFYQKRET

SEQ ID NO: 108846 - protein, 182 aa, Gossypium hirsutum
  Clone ID: LIB3829-008-Q6-K6-G2.pep
MELLWQNGQVVMQSQNQRSMKKLPSFKLLDADHSAPREIRSSSPSHKHRRHHHQEQQQLVTDHLFMQEDEMASWLHYPISDANFDHDFCTDLLYPPSSSPTAAVAPCVSSIVATSTPPILKRVSQVSVSASAKESVPRPPVPPARRNELEPARIHNFSHFSRHITARTEQSELSNSKNVMGE

SEQ ID NO: 108847 - protein, 66 aa, Gossypium hirsutum
  unsure (1)..(66): unsure at all Xaa locations
  Clone ID: LIB3829-008-Q6-K6-G6.pep
MWVFFACISXKKKKKKKKKKKKKKKKKKKKKKKKKKKKKKKKKKKKKKKKKKKKKGGPLLKKPNFP

SEQ ID NO: 108848 - protein, 80 aa, Gossypium hirsutum
  Clone ID: LIB3829-008-Q6-K6-H2.pep
MLRRIAWLIGFNNKVEQAKKLSNAKPQPAKVQPAVMLDTIQEIAIYIHRFHNLDLFQQGWYRLKITMRWENDQQTSIGAP

SEQ ID NO: 108849 - protein, 193 aa, Gossypium hirsutum
  unsure (1)..(193): unsure at all Xaa locations
  Clone ID: LIB3829-008-Q6-K6-H7.pep
DCCSATCLRNRXVEALATAALVQAIREAQEPRTLQEISIAANVXXKEIGKYIKILGEALQLSQPINSNSISVHMPRFCTLLQLNKSAQELATHIGEVVINKCFCTRRNPISISAAAIYLACQLEDKRKTQAEICKVTGLTEVTLRKVYKELLENWDDLLPSNYTPAVPPEKAFPTTTIATGRSSVPRVDSIDL

SEQ ID NO: 108850 - protein, 85 aa, Gossypium hirsutum
  Clone ID: LIB3829-008-Q6-N6-A2.pep
DKLGKSMSKCSGRSKSFRQTVISSYRKWKCLKIWLLVPNLVSCWFPQHDKAGRQAVALMEYVALGPRCRVELLMWPVNNEYAIVC

SEQ ID NO: 108851 - protein, 99 aa, Gossypium hirsutum
  Clone ID: LIB3829-008-Q6-N6-B10.pep
AQSHFFITKFIFIRQIRIKITDRESFDFFHFPTCFALPKSKVINGKKGVLHYKPFYMWTNNFSHMQLLQYLCCQLHLCFMSNPFHKYGIRGLLRGIAFL

SEQ ID NO: 108852 - protein, 88 aa, Gossypium hirsutum
  Clone ID: LIB3829-008-Q6-N6-B2.pep
PLFWPKEQGVRTLEPFACGGVHQFKFKLFGHFKGGHQQWGFSGWGTWVHGPLSWGGRHGQWASKLWFSWPVKRGGNEVGNSPLGFWMF

SEQ ID NO: 108853 - protein, 75 aa, Gossypium hirsutum
  Clone ID: LIB3829-008-Q6-N6-B3.pep
LPIQGSELWYFVLRCANVRAYFRSLTRLSIAPRYNSLSHARHKDTKQFVIRSCLLSADTFSYLVKASLLMKFFSL

SEQ ID NO: 108854 - protein, 84 aa, Gossypium hirsutum
  Clone ID: LIB3829-008-Q6-N6-B4.pep
GSPPRGDIAIILPRQYVAPLIRFLVDSPNNPVPAILETPSKDPPYAPAHDPVLSRGKFFFLLNQGPQEGVNDDVPPVCFLKSPF

SEQ ID NO: 108855 - protein, 146 aa, Gossypium hirsutum
  Clone ID: LIB3829-008-Q6-N6-C2.pep
LRGRTTPDPTSDQSCLLWDYLGQAFQDLVAKGVVEEEMLDGYYTPYYEPCPEEIQAEVEKEGSFAVDRLEVVALPWDYVNGGINYDRALTAKEMAKAMRAVNESMIGSHFGADIMDRLFHRFMEIMAADTMEVEHVSLVVSLIRNA

SEQ ID NO: 108856 - protein, 62 aa, Gossypium hirsutum
  Clone ID: LIB3829-008-Q6-N6-C4.pep
CCSYHFLKAASRYMESVSFGLSRLRRFMVWRTSVICRGALCGRSRGNLQEQRGREPLDFGKP

SEQ ID NO: 108857 - protein, 82 aa, Gossypium hirsutum
  Clone ID: LIB3829-008-Q6-N6-C6.pep
YNELVAVCHLVFDREFVSCHFAAVSSFLRKLGFLVPYIKTKGEHLDIKRQRIIRNTHPVLGSCQRLPLRKVFALLKLAINVE

SEQ ID NO: 108858 - protein, 125 aa, Gossypium hirsutum
  unsure (1)..(125): unsure at all Xaa locations
  Clone ID: LIB3829-008-Q6-N6-D11.pep
KREECTHLFPAGRVYSQAFHLGGQGFFLSAHCNMDQQSSFHCFGLFLGMQERGSVTFAVDYEFAARSNPTEDYVSKYKGNYLLTGGKAVGYRTLFGTPWTAFMSDDSISFIHGLXHLRAELTITQ

SEQ ID NO: 108859 - protein, 55 aa, Gossypium hirsutum
  Clone ID: LIB3829-008-Q6-N6-D5.pep
FRIIKNYDMAEYLKLEFMKETGFAHMRICDGVGSYLQLCGLLAKFSRVCETAKAT

SEQ ID NO: 108860 - protein, 140 aa, Gossypium hirsutum
  Clone ID: LIB3829-008-Q6-N6-D6.pep
AGPKDKAPIKRGVNIPETEQQLSLKTFSIITNKTPQKRPVPGDFTENAGYDSTGPRGIIIGKLRGGQKLGLGAIARKGIGKDHPKGAPAATGTFMYEPGIHINENLRESLTLEKKLSFVESSPTKGFDIDPNTQQGGGGD

SEQ ID NO: 108861 - protein, 111 aa, Gossypium hirsutum
  Clone ID: LIB3829-008-Q6-N6-E10.pep
GKTKTKREIQRQASPAPVEGMRRCSHCASEKTPQWRTGPLGPNTLCNACGVRYKSGRLVPEYRPAASPTFVLTQHSNSHRKVLELRRQKEEQSTTRQQEQVCRQQPRQQVC

SEQ ID NO: 108862 - protein, 62 aa, Gossypium hirsutum
  Clone ID: LIB3829-008-Q6-N6-E4.pep
ISYRPCASTSAPSSHSPLGLYVHTDSQAVKNPCPSLSYDIITTCIFKVCLCCKLSLMDFIFA

SEQ ID NO: 108863 - protein, 86 aa, Gossypium hirsutum
  unsure (1)..(86): unsure at all Xaa locations
  Clone ID: LIB3829-008-Q6-N6-F8.pep
VGENPKEGEKKRXPAWCDRILWYGKGIKQLCYQRAEIRLSDHRPVSSMFLLEVEVLDHRKLQRALNVSTAAVHPEIFFDENEDLEL

SEQ ID NO: 108864 - protein, 131 aa, Gossypium hirsutum
  Clone ID: LIB3829-008-Q6-N6-H3.pep
ASVMSVSLDGKYLALGSKDGDICVVEVKKMEISHWNKRLHLGTSIASLEFCPSQRVVLTTSSQWGAMVTKLNVPADWKEWQIYLLLLGLFLASAVVFYIFFEKSDSFWNFPIAREQTRRNIDSFLGGCTVR

SEQ ID NO: 108865 - protein, 97 aa, Gossypium hirsutum
  Clone ID: LIB3829-009-Q6-K6-A3.pep
HIYPYAVDQALPHAVDWYTNAEDTGATGPNAVTEWIIELLRSHMCTSLCVPIDSERQCTESKSMSQTYTDWTAVKTLSMYYALKGLKLADIKPWAYE

SEQ ID NO: 108866 - protein, 74 aa, Gossypium hirsutum
  Clone ID: LIB3829-009-Q6-K6-C10.pep
LFFKPWPQMLIITMLWRPILLPPQYLATLYIIQQARNQFAPSVIDSASYNVHKLKEPVDLSRKLPTLAVTPLLV

SEQ ID NO: 108867 - protein, 80 aa, Gossypium hirsutum
  Clone ID: LIB3829-009-Q6-K6-C11.pep
AKKKIRSIHFPSLITSLCLRAQVKSKANLKGQYVQGCITAHDLERLVENVHELNPVEPNEPTEPETDEIDYVIILAYSRY

SEQ ID NO: 108868 - protein, 103 aa, Gossypium hirsutum
  unsure (1)..(103): unsure at all Xaa locations
  Clone ID: LIB3829-009-Q6-K6-D1.pep
MTPSDMYKYNNILLNSDFEAHVANFGLANFLQDTGTSERMSAIADSYGYIAPEYTYTLKXVDEKSDVYMFPSGTFGANNMEEASWTFRTKRLDIAQWSKREPS

SEQ ID NO: 108869 - protein, 137 aa, Gossypium hirsutum
  Clone ID: LIB3829-009-Q6-K6-D12.pep
MGSACCVAARDRTIANRTGGETSHRNLRCSPSWSFCRDNRRRVAGEIDEPSYQVSNGTSRNVSMEIKGTLGSDRGNFSDQGSPLEIETYGTPTSQKSPVHEEMGGNMMTPPSDISRGSNYSVDIKNLVELPDIIDSS

SEQ ID NO: 108870 - protein, 135 aa, Gossypium hirsutum
  Clone ID: LIB3829-009-Q6-K6-D9.pep
EIVVSLDRGCDRNDLSFPQHIINAFYSYISLLESLDAAVNVNSDAINKIERFLIVPKIETTVLGRLHSLEKMPPWKSLFASAGFTPLTFSNFTETQAECVVKRAQVRGFHIQKCHASLVLCWQQKELISASAWRC

SEQ ID NO: 108871 - protein, 100 aa, Gossypium hirsutum
  Clone ID: LIB3829-009-Q6-K6-E4.pep
MNPQHHSQSEPDLPVPPLASLRIQPTSPRVPLTVTPTTGAQRRIAIAVDLSDESAYAVRWSVQNYLRPGDDVILLHVRPTSVLYGADWGSVQVQTIPNSN

SEQ ID NO: 108872 - protein, 106 aa, Gossypium hirsutum
  Clone ID: LIB3829-009-Q6-K6-E7.pep
AHLCNPHGLNMQVCGSNSPASVIHRRTKGSQGHNTFRLVEDQSLCRINISTLLTPKQTVLIHHKLCLFDTIYMTDSPQFECKNTLFNKERNYRPTFGKVSKTIESQ

SEQ ID NO: 108873 - protein, 77 aa, Gossypium hirsutum
  Clone ID: LIB3829-009-Q6-K6-F12.pep
ARRENPSPLSASTAAHVMRHSTVHYPNPYHVRATSVIPNLRRHSWGSLPLAKLAIIGAPSATVRWWFGGCMFLGMKP

SEQ ID NO: 108874 - protein, 149 aa, Gossypium hirsutum
  unsure (1)..(149): unsure at all Xaa locations
  Clone ID: LIB3829-009-Q6-K6-H10.pep
IFSKESKLSLKFKLKKPDLDNQNSKVHPVEEXNSIKGQRSKRQRPSTFVXKSLFNVDEDLDVTHTHQNSIMDGMMDANWILKKLGKDAIGKKVEIHHASDNSWHKGAVHDIIEGTSTVSVMLDDGRVKSLELGKQGIRFVLQKQKRSKF

SEQ ID NO: 108875 - protein, 150 aa, Gossypium hirsutum
  Clone ID: LIB3829-009-Q6-K6-H7.pep
SLNPSLIRWKVNMENQHPCGTRTETKGIDQRLERLEQMQIQMLEQLTKFQQDMKDQMLKVQRNLMSQLTQLLDKGLEKGKNQTVYFRDDNEDPAHFPNFTPTNIQAQPNTYPQRVTVNIRPQYQTSTSTSVNFATGSGSNLKGNLTNPVV

SEQ ID NO: 108876 - protein, 54 aa, Gossypium hirsutum
  Clone ID: LIB3829-009-Q6-K6-H8.pep
FNGLFNLILFFFIFFFFFFFFFFFFFFFFFFFFFFFFFFFFFFFFFFSRMKLVC

SEQ ID NO: 108877 - protein, 59 aa, Gossypium hirsutum
  Clone ID: LIB3829-009-Q6-N6-A6.pep
YVLRLRVWPSKILPFTISWLNWRLPIGTKPGHPLIAAIYLCSVSRNPSFEILLCYPQTN

SEQ ID NO: 108878 - protein, 75 aa, Gossypium hirsutum
  Clone ID: LIB3829-009-Q6-N6-A8.pep
EKPYKDPSAQEPIKLAIGALLEVVESGGKNIEVAVMRRTHGPAPLEEAEIDPIAAEIDAEKERAEPAKNPPPKEK

SEQ ID NO: 108879 - protein, 102 aa, Gossypium hirsutum
  unsure (1)..(102): unsure at all Xaa locations
  Clone ID: LIB3829-009-Q6-N6-B10.pep
VVHIVHTLSLQXPPPFHKNQFLXLMKKFLKTFTPTLDPETQDSLNKHIEGATKFFLSKLKPPQFFIGERTPHDGCLVFPYHKDGPVAPTFLSFGYALTPPQC

SEQ ID NO: 108880 - protein, 89 aa, Gossypium hirsutum
  Clone ID: LIB3829-009-Q6-N6-B3.pep
KKKRKDREKSMVKPRTGLAGPVSPPSIARSIKSPTTGSFSKDAARLTQQTAHQQSWHQPAHLPNGASVSWANPVKKLRTDAGKRRPSHL

SEQ ID NO: 108881 - protein, 100 aa, Gossypium hirsutum
  Clone ID: LIB3829-009-Q6-N6-B4.pep
ACLIALFLYFLKMVRQFNRHYFEESDLSGQSSRFARIQTFLSFVDEKEKEVKSRSKRRQMERTSNRSTDDGSNSPSYSLRRNSEFASNKSLGASPNRGEV

SEQ ID NO: 108882 - protein, 54 aa, Gossypium hirsutum
  unsure (1)..(54): unsure at all Xaa locations
  Clone ID: LIB3829-009-Q6-N6-C11.pep
RPQYAXGCITPHDLERLVENAHELPPVAPNAPPAPETQEIDYVILPRLSHVIDC

SEQ ID NO: 108883 - protein, 65 aa, Gossypium hirsutum
  Clone ID: LIB3829-009-Q6-N6-C3.pep
QSVQEFKIKINLIPRFLLLPKSTHDIEKRVCNLQCWIYLRYFKGVKIKLLRNMVADSRPTYVVMY

SEQ ID NO: 108884 - protein, 114 aa, Gossypium hirsutum
  Clone ID: LIB3829-009-Q6-N6-C4.pep
SRTPFPPFGPPGKKRFPPWIFFFPPKGRVGFFPVSGVKLVFPFQDFLIWLQWRRRHFWWGVFNFSGQKFFRVVSPLGLFFFCLFKISLGGLYPFVSHFCFFFWIPIFNKVLGSF

SEQ ID NO: 108885 - protein, 107 aa, Gossypium hirsutum
  Clone ID: LIB3829-009-Q6-N6-D1.pep
KVDEKSDVYSFGVVLLELITGRRPVGDFGEEGLDIVQWSKRETKLKKEGVVKILDHRVSNTIPKEEVMQVFFVAMLCVEEHSVERPTMREVVQMLAQAKQPNTFHMQ

SEQ ID NO: 108886 - protein, 116 aa, Gossypium hirsutum
  Clone ID: LIB3829-009-Q6-N6-E10.pep
VETKLSADGIGPITGPLFVGTPEKIPPSDLVDPTGAGDAFIGAVLYALWAGIPPKKMFPFAAQVAATGCRALGARNGLPPRTDPTFSDPPIESPPQGKAPPCCRRSLLSHTFPVIK

SEQ ID NO: 108887 - protein, 88 aa, Gossypium hirsutum
  Clone ID: LIB3829-009-Q6-N6-E4.pep
YQELVIHKKANNEGTREPETGPKKREDKGGGPPKKEEKPLEREKREQKRTGLGQLRSGRPKKGKPPSTQTRENKRFFPTPFPIRYTKH

SEQ ID NO: 108888 - protein, 75 aa, Gossypium hirsutum
  Clone ID: LIB3829-009-Q6-N6-E7.pep
VESKYEVKGQAFSQRFLSLSDGWMIKVLKGSVISFSMFYIYVCERSDNGCGSQVMRLVVGEVKAEQIGRRRSSEQ

SEQ ID NO: 108889 - protein, 76 aa, Gossypium hirsutum
  unsure (1)..(76): unsure at all Xaa locations
  Clone ID: LIB3829-009-Q6-N6-F10.pep
KKKSGNSPQDTRSDATLPLKRSRKRTQXAPHSLMLKPGSLLVMKGHPQRAWSHSAPKRAKAEPPRINLPFSLVPQE

SEQ ID NO: 108890 - protein, 101 aa, Gossypium hirsutum
  unsure (1)..(101): unsure at all Xaa locations
  Clone ID: LIB3829-009-Q6-N6-F11.pep
VYRGDQDSVTPLPGTXPLVSCLAKELXLETRAPYRVWFEGTQVGGWTQVHGNILSFATIRGXASHEAPFSQRESSLMLFNSSPLKERLPQKFFDSISSCSS

SEQ ID NO: 108891 - protein, 156 aa, Gossypium hirsutum
  Clone ID: LIB3829-009-Q6-N6-H7.pep
IPQRQESGTKQNIEKSQFTPIPMSYRELYQSLFDAHVISPFYVKPLQPPYPKWYDKNVQCDSHAGITGHSIENFPTFKRWLKGSSVWALLSSTQKICCPLILIIRVNAMNEEMLGNVHINVVPKETTEEEPLLDTPLYKLGSLLNKSDCRRNLCII

SEQ ID NO: 108892 - protein, 100 aa, Gossypium hirsutum
  Clone ID: LIB3829-010-Q6-K6-A10.pep
GNIIQKLQKSYVVDHTTYRKGQSNGTTSNDKSPSIYHSETMEPCYLSSSIYYGGQEYYSPKQQTTDAPLYFRKEGEEGDPIGINSNGASRGNWWQGSLYY

SEQ ID NO: 108893 - protein, 166 aa, Gossypium hirsutum
  unsure (1)..(166): unsure at all Xaa locations
  Clone ID: LIB3829-010-Q6-K6-A11.pep
TCVLFKKRSFPRWYLINHXRVLIGSGFETYEKGKTALQNWKHCGLDWAFVDPKTPIQNGVKFCVCLKEFLPWVIMPLQVVYVNENTRAKTKKSLASFGFGSGTLQGHLLAGEERFTIELDENDQVWYEVLSFSKPAHFLSFIGYPYVQLRQKYFAHQSANAVLKHV

SEQ ID NO: 108894 - protein, 132 aa, Gossypium hirsutum
  Clone ID: LIB3829-010-Q6-K6-A12.pep
RLSEDFLELSYASSVVNFETPILDVKFASEDNSINKSPLEALLSDMQVTGTAASCSKKSDDGSLEALLSDMQVTDTASSCSKSDDSSQPGEDCKLISVDEADVDGMPWNLEVENLEDYPACNNHEVAETNLI

SEQ ID NO: 108895 - protein, 45 aa, Gossypium hirsutum
  Clone ID: LIB3829-010-Q6-K6-A3.pep
VQYKFINTIVSGLLYLVVGNSESMNRYISFLCTGRLSIRRLVSHI

SEQ ID NO: 108896 - protein, 114 aa, Gossypium hirsutum
  Clone ID: LIB3829-010-Q6-K6-A4.pep
MDSLQGFETTGNPSVALTPIFPLSMTTVSAASAAMTTTNGNPLSVSSLSSSSSSSTSPTTTLSRYENQKRRDWNTFGQYLCNHRPPLSLSRCSGAHVLEFLRYLDQFGKTKVHT

SEQ ID NO: 108897 - protein, 182 aa, Gossypium hirsutum
  unsure (1)..(182): unsure at all Xaa locations
  Clone ID: LIB3829-010-Q6-K6-A9.pep
MMGRNLSPILRRELANLDKDADSRKSAMESXWKSYVRDLDSKAIPVFLAQVSETKETGCVSGEYTISLYEVLARVHGVKIVPQIDSIMSTIIKTLASSAGSFPLQQACSKVVPAIARYGIDPTTPEDKKRYIIHSLCKPLSESLLGSQESLSSGAALCLKALVESDNWRFASDEMVNNVCQN

SEQ ID NO: 108898 - protein, 194 aa, Gossypium hirsutum
  Clone ID: LIB3829-010-Q6-K6-C10.pep
STPQNQNPNKKSSIVLPSRISSHKCSSKIINRRVFSSGVDTSSSIPSKETVIASQSILSDQSPVPHPPPAPETFPPASGGKLWSFLKYGLVGAVTGTVGYAGYLSYKCSYEEVDQKAKALRAAASYAPSEDASAIDKYRGLLYSAAMTVPAKALESYLDLRRLVEENVLEFTEPTSDKLLPDLHPQEQHVFTLV

SEQ ID NO: 108899 - protein, 194 aa, Gossypium hirsutum
  unsure (1)..(194): unsure at all Xaa locations
  Clone ID: LIB3829-010-Q6-K6-C8.pep
DSQLGKHLNRSWPRDMDGSTLTNKDRWEIDAAKLDIRDVIAHGTYGTVYRGVXDTQHVAVKVLDCREDGMATLAEAVALWALFPQEAAVWHKLDXPNVTNFIEALMITSNLKIPYKRLXSENNNSLPDIACSSGDQYLPGGTLKNFLIMNRRNKLALNVAIQIAQDXLSRRLSYLHSKKIVHRDVKTENMLLDA

SEQ ID NO: 108900 - protein, 139 aa, Gossypium hirsutum
  unsure (1)..(139): unsure at all Xaa locations
  Clone ID: LIB3829-010-Q6-K6-D1.pep
IDMSANQXLYSHLEXLAEVLLEASSGAINAKVERGEEHXSLLNEYWSRRDAILDSLYQQVKGFVEAGRQDLTDSTGENKEEILKNLSSSLLSIAKRHEGYQTMWNICCDLNDSGLLKNLMHESMGPRCGFSYFVXLNCM

SEQ ID NO: 108901 - protein, 72 aa, Gossypium hirsutum
  unsure (1)..(72): unsure at all Xaa locations
  Clone ID: LIB3829-010-Q6-K6-F10.pep
XCERKVTSLSSILPAQGEQKWRSECRSFQRSIVEMNQLIELITDIPPLSTSFKNSPTNFTTIQWFYWEKATM

SEQ ID NO: 108902 - protein, 155 aa, Gossypium hirsutum
  unsure (1)..(155): unsure at all Xaa locations
  Clone ID: LIB3829-010-Q6-K6-F12.pep
VLLSWFAGKEXLELETLSDEEIINGVSATVSGLLPVSKHHKEDKYNSPEFCNGNVESCDDNGVRFGKVLKSKWGSDPLFLGSYSYVAVGSSGADLDTMAEPLPKLGSTDSDHHPLQILFAGEATHRTHYSTTHGAYFSGLREANRLLKHYRCVGV

SEQ ID NO: 108903 - protein, 162 aa, Gossypium hirsutum
  unsure (1)..(162): unsure at all Xaa locations
  Clone ID: LIB3829-010-Q6-K6-F3.pep
MRLFMFILVLGGASFAVTSNRLSQYEVIEKDYMNWVKQKSSFKHSLFGKPKNKLKPCLTIRVNKKPSLAEFATVKKAISSIPVVNHCRVVIFIGAGIYRQMXEKIEIPATMAYITIVGAGADKTVIEWDDTADKMGQSGHSLGTYGSATFAINSPYFIAKNI

SEQ ID NO: 108904 - protein, 76 aa, Gossypium hirsutum
  Clone ID: LIB3829-010-Q6-K6-F6.pep
RITLFTVCWEQEPVLPFYQTRSLALAQALNLIELGRHFKTYQHTTRSFIQDPIFIHTKPTLHFCALGACFFLKSHP

SEQ ID NO: 108905 - protein, 166 aa, Gossypium hirsutum
  Clone ID: LIB3829-010-Q6-K6-F9.pep
GVERCRNGESAPLVAQNDKGFDGLIPQLFTSLPALNEAVSCLAQTTTYFTGCFSDYAVEPSTRDSGDSVVHAQELETFSSVQTEDTVISDHPFSSESTSTLAESSSLVNATSANHVGIARATAGDPSENTGVIVHSNHNGQNGISMFQGLIERAQRTVRGSADDIG

SEQ ID NO: 108906 - protein, 192 aa, Gossypium hirsutum
  unsure (1)..(192): unsure at all Xaa locations
  Clone ID: LIB3829-010-Q6-K6-H10.pep
KAKADNXXNREALSTASCPNCGGPTAVGQMSFDEHHLRLENSRLREEIDRISAIAAKYVGKPVVNFPLLSSPAPPRPFDFGSQPVTEEMYGVGDLLRSISAPSEADKPMIIELAVAAMEELVRMAQMGEPLWMTSLDGTTCMLNEEEYIRTFPSGIGPKPTGFKCEASKETTVVIMNHINLVEILMDVNQWS

SEQ ID NO: 108907 - protein, 51 aa, Gossypium hirsutum
  Clone ID: LIB3829-010-Q6-K6-H5.pep
CDIDPCSPNKSPHLTGAHRSVPGIALRSKNYIFPFSRPKKQQTTSFNRTSV

SEQ ID NO: 108908 - protein, 110 aa, Gossypium hirsutum
  Clone ID: LIB3829-010-Q6-N6-A11.pep
KRGLNWGLVSRNFYPGVITLLPVVYVKEHPRGKTKKSLASFGLGRGTSQGPPCAGEDRFTLELEEPTQVGYEALSFWKPAHFRWFMGSPYAHLRQKYFAPQSANAVLTHV

SEQ ID NO: 108909 - protein, 55 aa, Gossypium hirsutum
  Clone ID: LIB3829-010-Q6-N6-A12.pep
SQLTKGMWMVSLGPWSWNPGRILPHVTPMKFGNHPLYEREVLPTSHDVVNNLFSE

SEQ ID NO: 108910 - protein, 99 aa, Gossypium hirsutum
  Clone ID: LIB3829-010-Q6-N6-B11.pep
ERGMSPAFVLRIGAASSDEHMFEVLISSVLGPLIAPRAQVFACPVGKTPSKAKSPLADPVEICRLTQGLAPVSAQTHWVLASLGKGKHERRTALSLCWS

SEQ ID NO: 108911 - protein, 90 aa, Gossypium hirsutum
  unsure (1)..(90): unsure at all Xaa locations
  Clone ID: LIB3829-010-Q6-N6-B12.pep
FFGLSVQEKSSSLRELQWFTCGERARSFPARDIIKCGVVRGSRSNQTLXPSIGHQECEQRSQNIPETMSTHLNMCPWGGSHRYGMCIPNI

SEQ ID NO: 108912 - protein, 113 aa, Gossypium hirsutum
  Clone ID: LIB3829-010-Q6-N6-B6.pep
MGGGATPNPKKKTNPNGNYITGLNSFGGVKAHNKGGSLGQRVCTEQSFANIVSSLKAPTKGKTGKSGGGALFSTCNAIGEIFRIAAIMNGLVLGGVAGGFGLVRIKAFLEEAE

SEQ ID NO: 108913 - protein, 105 aa, Gossypium hirsutum
  Clone ID: LIB3829-010-Q6-N6-C1.pep
FSPVTGLSDHDPWLQDTSFPSLCGSNNHFPNKSLDEMSYGSLNGSAGTHPFEPFAAKCWPKKEWVMQDSEQPVGKSSISRPHVGGLFHNQMYSHFGNLIEIEKQK

SEQ ID NO: 108914 - protein, 76 aa, Gossypium hirsutum
  unsure (1)..(76): unsure at all Xaa locations
  Clone ID: LIB3829-010-Q6-N6-C10.pep
ENCAPINPFKLEGDDTALLDLTPSLEXVARNSPPDLTQVSNSYERKALAKEFLARSKESQRGTQAQRPQQGRFWWR

SEQ ID NO: 108915 - protein, 166 aa, Gossypium hirsutum
  unsure (1)..(166): unsure at all Xaa locations
  Clone ID: LIB3829-010-Q6-N6-C4.pep
GGGGRLAQPPLSPPSPPPPTPTPKIPSXFPPPPXSKKNPPSPPIPNPPPPPXSPFINPPPPPFSPPXNRPLTPPQLXNLPPPLAPPPFPLYPPGPSLFXNFNRTTFPPRHRLFPYLRQPPIPPPLGNPGPPPGPGPNSPGHPPRPRTRGRPRGRPLGFNCQWDYHS

SEQ ID NO: 108916 - protein, 126 aa, Gossypium hirsutum
  unsure (1)..(126): unsure at all Xaa locations
  Clone ID: LIB3829-010-Q6-N6-C8.pep
WVYMAPVGPLMGSLYNRYMSRNTVYGICLWKIFFCHMLYPALSFPRVSSTVVSQNLRPYIPICCPSSSPSISXKCWDAHPEGRTYMKQVVILLXTVDSSKVGGMIXDDQASGCLCFCCPWSVMLLP

SEQ ID NO: 108917 - protein, 92 aa, Gossypium hirsutum
  unsure (1)..(92): unsure at all Xaa locations
  Clone ID: LIB3829-010-Q6-N6-D12.pep
EIFAKFARPHSDPLPXHELKPTLKAHREPKDSRGWVATWPEWIPLPHLRKPKGGLLKKDPIRGVYDGPLSPQMEREKLPPGPHKESHTLTGA

SEQ ID NO: 108918 - protein, 50 aa, Gossypium hirsutum
  unsure (1)..(50): unsure at all Xaa locations
  Clone ID: LIB3829-010-Q6-N6-D3.pep
VGTSQSPKGPDYALXSIRNIKQALPELWETDMKSEVNYSGQVSVETPVPA

SEQ ID NO: 108919 - protein, 74 aa, Gossypium hirsutum
  Clone ID: LIB3829-010-Q6-N6-D5.pep
PDRWFRGGVLAKAQKPVCIISHPPRVVGVFSPLAPKFVFLFAKGPFVPWYVGEGMKKEKFSEARGAPSALEKVF

SEQ ID NO: 108920 - protein, 118 aa, Gossypium hirsutum
  Clone ID: LIB3829-010-Q6-N6-E1.pep
IKRGGAKNLINGGKIIQNPLNPGGTPQNTPPLKKKWVAPKPLGPKSPFPGQQKKPLELWVKKPKGGGGFPGPNRGESQGFWLNRGPKKARVACSPWLAPRFFINGNFRTRGRPPGSPP

SEQ ID NO: 108921 - protein, 75 aa, Gossypium hirsutum
  Clone ID: LIB3829-010-Q6-N6-E4.pep
VKQQFDQIGLTPEEVISKIMANPEVAMAFQNPRVQAAIMDCSQNPLSIAKYQNDKEVMDVFNKISELFPGVTGPP

SEQ ID NO: 108922 - protein, 122 aa, Gossypium hirsutum
  Clone ID: LIB3829-010-Q6-N6-E7.pep
MWTLVEVIKLVDGIAKYGVGRWTNIKKLLFASSTYRTPVDLRDKWRNLLRSSSVQENNRREVENHPKHAVRPLPKPVVRRIRELATIHPYPKVSSVDYVPSSEQPTTKGTPVYYRARNLRRK

SEQ ID NO: 108923 - protein, 75 aa, Gossypium hirsutum
  Clone ID: LIB3829-010-Q6-N6-F10.pep
PLFIEFNRYLRSLSLFPSLMTYPVLRLLAFPGIQAVVRATVPENSSLDECSASNFTFSKGTDAFMEGYNILISVA

SEQ ID NO: 108924 - protein, 73 aa, Gossypium hirsutum
  Clone ID: LIB3829-010-Q6-N6-F11.pep
FLGLISGHLKTPGGKGGRQTFQHQASGFRAPWGAPNLWGGPSKSFPAGFGGARAWAPGRGGAHLSVRGLSKPN

SEQ ID NO: 108925 - protein, 45 aa, Gossypium hirsutum
  Clone ID: LIB3829-010-Q6-N6-F12.pep
FIFQILYFPKSFSYSIYINPVCFIFPPPPPRVNESKREKKKREGG

SEQ ID NO: 108926 - protein, 91 aa, Gossypium hirsutum
  Clone ID: LIB3829-010-Q6-N6-H3.pep
KNLAKLTLFRQFYIVVIGYLYFTRIVVFALRTIAAYKYQWVSNAAEETASLAFYLVMFYMFRPVEKNEYFILDEEDEEAAEIALRDEEFEL

SEQ ID NO: 108927 - protein, 75 aa, Gossypium hirsutum
  Clone ID: LIB3829-010-Q6-N6-H5.pep
ISFVFGMLIYEDLKKVSLIDEWDIVEHHAFPHPPLEMLDCEQCSGCMSPKGSRKMLIPCEVSKGLCDMSQYALRF

SEQ ID NO: 108928 - protein, 47 aa, Gossypium hirsutum
  Clone ID: LIB3829-010-Q6-N6-H9.pep
RLSYDEFAPLMKPGPDWRKASRHYSKGGFTSLSIKLMKDGSLNLGNE

SEQ ID NO: 108929 - protein, 196 aa, Gossypium hirsutum
  Clone ID: LIB3829-011-Q6-K6-C11.pep
RCILGLITFGIAVPSGLFLPIILMGSGYGRLLSMAMGSYTNLDEGLFAVLGAASLMAGSMRMTVSLCVIFLELTNNLLLLPITMIVLLIAKTVGDCFNPSIYEIILELKGLPFLDANPEPWMRNLTVGELADVKPPVVTLCGVEKVSRIVDVLRNTTHNAFPIVDQGVPVPGMVATGATELHGLILRAHLVQALKK

SEQ ID NO: 108930 - protein, 160 aa, Gossypium hirsutum
  Clone ID: LIB3829-011-Q6-K6-D12.pep
MQNSYNHRRGRQAPPPKIVPLPGQVSFRVICHASSIGGFIGSSGAVVSQLRRETSSRIHCEESVGGSDHRVILVVGSGSVERQFSLGEGEVCYVSCAQEAMIRVFQRVWEVEAEREWGNACDGEDEEAYCGVLAETAQIGFVVGKGGKNIVRMRTESGAK

SEQ ID NO: 108931 - protein, 56 aa, Gossypium hirsutum
  Clone ID: LIB3829-011-Q6-K6-F10.pep
FERVVKSLMVDIERYFTGIDHEVCITGDWHAFKGWPEQTCTCGRTVDRFKLCMRTR

SEQ ID NO: 108932 - protein, 194 aa, Gossypium hirsutum
  unsure (1)..(194): unsure at all Xaa locations
  Clone ID: LIB3829-011-Q6-K6-H9.pep
LSGXTGCNMFKYKLVRLPGQTGAFXDMXKSIRKWKEDPSSRDGLILPDLTSGAXESIPVSLVNEVDDEKGPAYFTYVSTVKYPKSFKLVQPSYGCNCRDACQAGNSNCSCIQKNGGDFPYITTGILACRMPMIFECGSSCPCFRNCKNRVLQTGFKVHFEVFKTRDKGWGLRSWDPIRAGTFICEYAGEVIEKI

SEQ ID NO: 108933 - protein, 31 aa, Gossypium hirsutum
  Clone ID: LIB3829-011-Q6-N6-B11.pep
RKTNSPWVIFDFPAHYPVISLCSGPLYVTPD

SEQ ID NO: 108934 - protein, 91 aa, Gossypium hirsutum
  Clone ID: LIB3829-011-Q6-N6-B9.pep
LGCPLTVLRARASKQRGLPSTDTSEACKLFDFFVQGSKHGTPTLRIANVHDGLYFLHFQTTLSALQSFSIAVAYIHAQSPNFRQKNVKLSR

SEQ ID NO: 108935 - protein, 74 aa, Gossypium hirsutum
  Clone ID: LIB3829-011-Q6-N6-D10.pep
ERKWRYVLELYSQEKGRQSSVHGLHCRLLMTPMKILIFLCKDRVRLTRKVIHGLFAARIAAPFRISTRSTDAVM

SEQ ID NO: 108936 - protein, 144 aa, Gossypium hirsutum
  Clone ID: LIB3829-011-Q6-N6-D12.pep
CSNGAAGAIIGKKGAIVKALQNQTGASIMFESLETDHRDRVVTISALENLESQYSPAQNAVVLVFARSVEADIERGFQSVLIKGTPVTLRLLVASNIVHCLKDKEGRVLFEIAELTGADIQVLIEELSLGHSPENVVQVQMLFL

SEQ ID NO: 108937 - protein, 100 aa, Gossypium hirsutum
  Clone ID: LIB3829-011-Q6-N6-E9.pep
NTIIMQGLPGLNYIVGETDGANPKKDPRVPGKQQTVISFTKKNTPGINIAAGEGFPSKVFFNGEECALPSVFPTNNSNREGFTTILSIFLAVFVFIMLHQ

SEQ ID NO: 108938 - protein, 97 aa, Gossypium hirsutum
  Clone ID: LIB3829-011-Q6-N6-H10.pep
RRAFPPKICFVLSSAPCPPFLCRVSPVPALSSLKFAIPSPSLFHFRVFFLNFAPLLFFFCSFVSVWFLFCPGSGLAPPLVLEARPTNPSLPGFPFQT

SEQ ID NO: 108939 - protein, 122 aa, Gossypium hirsutum
  Clone ID: LIB3829-011-Q6-N6-H12.pep
GGDDTHPMIDKIHQVLKEMERRMKEEMGYVHGVKFALRDIDEESKVESLRVHSEKLAIGLALCHGGWDEARVIRVFKNLRICGDCHDFIKCLSKIVKVVFVVRDANRFHQFKDGLCSCRDYW

SEQ ID NO: 108940 - protein, 149 aa, Gossypium hirsutum
  Clone ID: LIB3829-011-Q6-N6-H9.pep
EYAGEVIEKIKEKADGDDGENNDYVFDTNRVYESFKWNHETESAEERSDTSEKFDIPSPLIISSKNSGNIARFMNHSCSPNVFWQPIMYEHNNEAFLHIAFFAKKHIPPMTELTYDYGIPRSDETESNNMEHGKKKCLCGSPKCRGYFY

SEQ ID NO: 108941 - protein, 41 aa, Gossypium hirsutum
  unsure (1)..(41): unsure at all Xaa locations
  Clone ID: LIB3829-012-Q6-K6-C12.pep
VRFYFLLLFKKTVSFFYSNVLSFFLLSFSLKLXRFFSFFSC

SEQ ID NO: 108942 - protein, 179 aa, Gossypium hirsutum
  Clone ID: LIB3829-012-Q6-K6-C7.pep
RSQMSIFAGNFSFKISSTLQFRVFSFPWVNGNKAIFCLKEKEYSSSVPVRYIPKKSLETEEPETSSHSKGLSKNESRKSTAWNVFGRKFTNNEGSVIDKKSQTQSGMFKKIALHDDVQQGDEIMVKPVEVVEEVPQGQNMNRKNSLQVCKRMSDAEKLAIELLAARAFTAVELRKKLLG

SEQ ID NO: 108943 - protein, 175 aa, Gossypium hirsutum
  unsure (1)..(175): unsure at all Xaa locations
  Clone ID: LIB3829-012-Q6-K6-D12.pep
MAMHAGVQTSKXLILMGAGLTGSIVPRSGRXSELIPQLQELLKGVDDVQFSPYKCDHTLLAAQIKQLAQELKDLTTSNPVTILNGNSRSGGGIASYLVPSAPLAALRYXHMWWKGLSIFDVMXVTKQNMMDAGTTVPKHXDNVSETLNTTXRHLSIRLEGLDXKVEDHKETYLII

SEQ ID NO: 108944 - protein, 95 aa, Gossypium hirsutum
  Clone ID: LIB3829-012-Q6-K6-E12.pep
RSEKSCPYFMRAASCHLGVACHVHHPQPAKAGTGLPGNGPVGSLVVPPTGVPYAGGLPYWPLPRAPYEYGPHLQTPKIMPVESSPSENILSRNGW

SEQ ID NO: 108945 - protein, 61 aa, Gossypium hirsutum
  unsure (1)..(61): unsure at all Xaa locations
  Clone ID: LIB3829-012-Q6-K6-E9.pep
THNILXFENDRHIKQFLDKVYTAVVEFSALSLVVNRKDLPCFALWSWKPPPIDWFKLIVLQ

SEQ ID NO: 108946 - protein, 55 aa, Gossypium hirsutum
  Clone ID: LIB3829-012-Q6-N6-C12.pep
YTQGFFFWPLGGLSFLNPFCPLTHERPVKDPLGRLAPALSPGYAPFGPPLKAKTN

SEQ ID NO: 108947 - protein, 96 aa, Gossypium hirsutum
  Clone ID: LIB3829-012-Q6-N6-C7.pep
QALFKKGISEADAENALKLVFEGRDSDSNDDQESRLGFSKLSMDHLLIQASKQWLRGRDVPKETRKSRIVRWLQYRGFNWGVIGSVLKKLESQYPS

SEQ ID NO: 108948 - protein, 110 aa, Gossypium hirsutum
  Clone ID: LIB3829-012-Q6-N6-D12.pep
STSPRHDHSKNKAVEDATLSKHAHPDSGKRRSSSRYGSTSRRAVVTSRPSSSGEPNDIPQNRLSSTGGRMSTTQRIQHALEAKTSSRATTVRGSRDDHPLRSFELLSIRK

SEQ ID NO: 108949 - protein, 74 aa, Gossypium hirsutum
  Clone ID: LIB3829-012-Q6-N6-E10.pep
PRGPGRGGSAHGSGVREKSPGQIYWEGLLTLGGGYGFWKQVSTLARRENPRSLEMFSAFKAPKRGEWVPLAGGG

SEQ ID NO: 108950 - protein, 53 aa, Gossypium hirsutum
  Clone ID: LIB3829-012-Q6-N6-E9.pep
FNMKINLYIYLLKCGQLNQNRSFLYTYESKFKFYEHNCIKSMYQNVYLTKIHI

SEQ ID NO: 108951 - protein, 62 aa, Gossypium hirsutum
  Clone ID: LIB3829-012-Q6-N6-H12.pep
TISAKETLSRPLCRSQQRASPARRVLSLCRTLLYYATSVIHPRTYLGPLRGSASEVEAQKCR

SEQ ID NO: 108952 - protein, 60 aa, Gossypium hirsutum
  Clone ID: LIB3829-013-Q6-K6-A10.pep
FLPCLLLEPKNRQTPIPLVAYTSQNLPNFRLTSKNSFSQSLYLSLILQCFTSLCQLQIAL

SEQ ID NO: 108953 - protein, 172 aa, Gossypium hirsutum
  Clone ID: LIB3829-013-Q6-K6-B11.pep
MVRSKASLLDLDHDDHHQLMDGPDGDVGAVPPSSSDVSCSICLDLVSDTGGRSRAKLLCGHQFHLDCIGSAFNMKGAMQCPNCRKVEKGQWLYANGSNRSLPELTMEDWNLDDDYYEPVYSEMQFRAQWCPYGEFTRIGSSSEEVESPSTTSAALRSSNGEPDASTVPRLFG

SEQ ID NO: 108954 - protein, 110 aa, Gossypium hirsutum
  Clone ID: LIB3829-013-Q6-K6-C7.pep
PLGSADAPLAPDCRPTALCTDPLSPPLICNLATASSFHDLIVGGFFPVAGIVPKRGKKGPFSFRFRGFRVYHLWTHSKSDRQTPSLRFVSHRIQRGYEGRWKAKGRPGED

SEQ ID NO: 108955 - protein, 89 aa, Gossypium hirsutum
  Clone ID: LIB3829-013-Q6-K6-E12.pep
LTHLCRVALPLLHFFSVHGFHCWYYRIINALNCCDFLRFFSIKFDEIADQTFLLLFDLQTSSILVLDCGVIKSFKVGENSVLMFQNILN

SEQ ID NO: 108956 - protein, 156 aa, Gossypium hirsutum
  Clone ID: LIB3829-013-Q6-K6-E8.pep
MGLFRRLFGAKKPAQQRPDKDRRRWSFTRSSHPTSSTSHLDALSGPCNGTLDANKRAIAVAAATAAVAEAALAAAHAAAEVVRLTSGGVGSADGSNRRLPQELAAVKIQSAFRGYLARRALRALKALVKLQALVRGHVARKQTADMLRRMQTLVRL

SEQ ID NO: 108957 - protein, 89 aa, Gossypium hirsutum
  unsure (1)..(89): unsure at all Xaa locations
  Clone ID: LIB3829-013-Q6-K6-H8.pep
GADPYVRDSSDCIFGTQGQHYRDLDFANVWNCERRPAMMDLPTTKXNDTTLELIPNWCQDGKILPAXMDHSKGSPLFHXQICKMPPDVN

SEQ ID NO: 108958 - protein, 142 aa, Gossypium hirsutum
  Clone ID: LIB3829-013-Q6-N6-B11.pep
SSSRGGSSFVSSVFHHHPGSGAHTHDRTWPSLAYYRQQHRFNQQRFNRPGVPAPVVPGIRGVAPMTPAVPQPDQTGGFYVYPRSSSSGQNLPEAESSYPNNYIALERERLSHFRTVSRVTGWGAYRPTSGSGSGNRSGTDHR

SEQ ID NO: 108959 - protein, 47 aa, Gossypium hirsutum
  Clone ID: LIB3829-013-Q6-N6-B8.pep
PYACLLAFLLSSAGLLVSIHVCSGLFFRANWNISMLSLLYMSDYLLG

SEQ ID NO: 108960 - protein, 104 aa, Gossypium hirsutum
  Clone ID: LIB3829-013-Q6-N6-C7.pep
IHVCFSFQHQSNFGTLKRKMIGIAIWVCYLLLVRKNNSFLLYPLRLGKCGSTTNHQRTSGSEGLILASLLLSSKGSLPTTPTNKLLAPFRRVSSIHSSGHLLFC

SEQ ID NO: 108961 - protein, 154 aa, Gossypium hirsutum
  Clone ID: LIB3829-013-Q6-N6-E12.pep
DKHRLYVFKFIRKVVIARMAESPDLASAYPSKLREAYETEEKLKNADLVKRSTESLVQLLDEVETKLNDPTYIVGDEFTMADATFVPVLARLVLLGLENEYISCRPNIADYWGLVQQRPTYKKVIGKYFNGWRKEKTLIKTWCSLQIRNLLKRY

SEQ ID NO: 108962 - protein, 90 aa, Gossypium hirsutum
  Clone ID: LIB3829-013-Q6-N6-E8.pep
FAKRECSWGYLSGFSGHPNYMANTESFRAKYRSQSAPRQRLEFDKYGSNRRTFQGLWDSERDSAQHVDYRYRYNLASDCLNKLAGAHQGQ

SEQ ID NO: 108963 - protein, 51 aa, Gossypium hirsutum
  unsure (1)..(51): unsure at all Xaa locations
  Clone ID: LIB3829-013-Q6-N6-F9.pep
MQQQQLFQQQQMVGSGMGPAYVQGPGXSQLVFQGQVSSQAPPNMPGGGFMS

SEQ ID NO: 108964 - protein, 145 aa, Gossypium hirsutum
  Clone ID: LIB3829-013-Q6-N6-G8.pep
KGKRGGLCSNGKTRPKKASGKGFLPGAFNSNGKPLKLETFFIKGGENLGVFIPKPNWQRNIAGLKAQKGHFPWPQRGIGDGKKTQALKYNKPHFCPQNGNQRGHPWIPPPLFFSRPPKRRPFKHPLGCPRFFKLVFWDTLHNGEL

SEQ ID NO: 108965 - protein, 76 aa, Gossypium hirsutum
  Clone ID: LIB3829-013-Q6-N6-H9.pep
TPPVGYLGNVPFGYKGCASFSFPAKQFFFPGPNSFFGKTVVVHPDPHALGKGGPWLPKSPGNSGGKVPFGFFGLQG

SEQ ID NO: 108966 - protein, 199 aa, Gossypium hirsutum
  Clone ID: LIB3829-014-Q6-K6-A11.pep
EKLMLQHLCCYDSEVIVNGDLSKETIMKEVPSLQNHVMAEGSVLKESFFPPFNVPSKDSSEACFSNLVQGEDLQPSACSVGGNLGSSKTENSTVTTGGKDSDCNERGNTKGGFEIPVTLSPNCGGFQNSGTAKIASKETLQKISCASKIEVSSTVALEDLIGKAVKKVPGKALSMSTTSETSKNAQATMSLDKPICNGS

SEQ ID NO: 108967 - protein, 180 aa, Gossypium hirsutum
  unsure (1)..(180): unsure at all Xaa locations
  Clone ID: LIB3829-014-Q6-K6-A12.pep
RQGGLMKPAFTIMRDKDSKCFLLLIRGTHSIKDTLTAATGAVVPFHHSVLHEGGIFXFVLGYAHCGMVAAARWIAKLAASCLLKALSEYPDYQVKIVGHSLGGGTAALLTYILREQKEFASSTCFTFAPAACMTWDLAESGKHFITTIINGSDLVPTFSAASVDDLRTEVTASLWLNDLR

SEQ ID NO: 108968 - protein, 197 aa, Gossypium hirsutum
  unsure (1)..(197): unsure at all Xaa locations
  Clone ID: LIB3829-014-Q6-K6-A7.pep
LFLHIFLAISVLKSLPAPSHHSILRYGLLPLPSTQSIHQSFFVDQILLQMLSTTLPTVEFTIGANPLGSNSGVSRATKKVCTRMELLPDMDDSTIDGNGQKVQGSEVPRVSYKLALLGAXPVPAQNALMKQDFALTEGNVITEVVEGVPLITFFDRVQEYIERRMSRTIIVKMFGGRIGFINASLNKISLFVESKMP

SEQ ID NO: 108969 - protein, 195 aa, Gossypium hirsutum
  unsure (1)..(195): unsure at all Xaa locations
  Clone ID: LIB3829-014-Q6-K6-B7.pep
VRFCWFQNYVKVKATGSPMTSVAQVIVVAIKKRKLKPVEQPWLSLFKYFPPKSINSKLPYTDQFRFLDKAAIVTPQDEIKGDGSPADPWRLCSLQQVEEVKCLFRVLPIWASQIMYCVTLVQLHTYAVFQAVQSDRRLGNSNFKIPAASYVVFMMLSLTIFIPVYDRAIVPFLRKIRAKEXGITILQRIGIGMFV

SEQ ID NO: 108970 - protein, 50 aa, Gossypium hirsutum
  Clone ID: LIB3829-014-Q6-K6-D10.pep
DPIFIFFFDMNILVCLWNFCPWYLCNISDWNFFGFLNIYIYIYLSFMFDL

SEQ ID NO: 108971 - protein, 74 aa, Gossypium hirsutum
  unsure (1)..(74): unsure at all Xaa locations
  Clone ID: LIB3829-014-Q6-K6-D7.pep
GQFEILCLSGSYLLAEDGGPRSRTGGISASLSTPDGHVIGGGIATLIASSLVQLVVCSFVYGGSKTXNKQLASP

SEQ ID NO: 108972 - protein, 83 aa, Gossypium hirsutum
  Clone ID: LIB3829-014-Q6-K6-H11.pep
CFYMISLVICRPVGSSNEALWSNSLVVHGVCLHVWIREGLIVWHVMDSIIHYLNRIMLRMDSRHCILIDVSCIAMHRLSGACT

SEQ ID NO: 108973 - protein, 171 aa, Gossypium hirsutum
  Clone ID: LIB3829-014-Q6-N6-A12.pep
TDEDEPLITMDRVITTSTVDEITGGELWYELEKELKRRASEVDLQARAEEAAVAKEITEEETVIADTSSESKKTVSSSDALENHQFYPPGRIMHIVSIPSLDPSGKLDDDDGDGDGDGSNDERVGIYETPRELYSKIRLSRTMINDHYMPMYKKMMELLISELQKDEASNY

SEQ ID NO: 108974 - protein, 99 aa, Gossypium hirsutum
  Clone ID: LIB3829-014-Q6-N6-A7.pep
GPLGLWGVCFDLIKSRGSKVKINTCFQRVGYGSPPNICFKWGPLGQGGALGRGVKWALGGGSNPLFEKQKFGGGLKNETKMGVPPDPLLGGGGAPLKCF

SEQ ID NO: 108975 - protein, 84 aa, Gossypium hirsutum
  Clone ID: LIB3829-014-Q6-N6-B11.pep
WNLLKLIAPTKKGLEAPLRGYMSMNMRRSRRMTMVARPVVLGCDVVYVLQLRVKFGLHAFICACRVWVCVRACFLLAKYFWVVV

SEQ ID NO: 108976 - protein, 61 aa, Gossypium hirsutum
  Clone ID: LIB3829-014-Q6-N6-C7.pep
DYIIEAKVITLVLNFHMPQQLLIWTNQFQSSLSHHGAKNTCEEIKENNKGRETGEKQNSSP

SEQ ID NO: 108977 - protein, 57 aa, Gossypium hirsutum
  Clone ID: LIB3829-014-Q6-N6-C8.pep
KIFSIFLISFVSKSDGTQYIYLFTSNRNSHPFLIILSISPQYTPHLIISFTLVKTSL

SEQ ID NO: 108978 - protein, 67 aa, Gossypium hirsutum
  Clone ID: LIB3829-014-Q6-N6-D11.pep
SNKYFKNYIQIPHVKKHDTKVQTKCETKCFSIQLHAILLLGFLFVFAPEKELAIANTCLLYMHTSCS

SEQ ID NO: 108979 - protein, 63 aa, Gossypium hirsutum
  Clone ID: LIB3829-014-Q6-N6-D7.pep
KTKNKQLASPKAEEAVPQRCGDSTMPTTAPSTQHFIPPSMSAWPGSRPVGLRNPHADIDLMRG

SEQ ID NO: 108980 - protein, 145 aa, Gossypium hirsutum
  Clone ID: LIB3829-014-Q6-N6-E10.pep
EIGLPDRRERVEILKVILKGENIEESINFDYIASLCEGYTGSDILELCKKAAYFPIRDLLDEEKKGKSSGDPRPLSQADLERVLATSKKTGVAANEYTRLNSQLPGWSRQNHSESDDYQVQAAINELSKLVVSQIVNLQSDSQDT

SEQ ID NO: 108981 - protein, 95 aa, Gossypium hirsutum
  Clone ID: LIB3829-014-Q6-N6-E8.pep
YPGKRKRPPKTRAFPPVLLLLKKGVPPPLKSPPPIGPPMLMRLSKLALPLYKGKFPVKAFKKRFGASPLGWFFPPISGGLLGGGPGFNGQKKARP

SEQ ID NO: 108982 - protein, 164 aa, Gossypium hirsutum
  Clone ID: LIB3829-014-Q6-N6-F10.pep
GAILLNKVPIFITFFYSISNQSNRGYRGPRTLHPGGQGPQRGGGGEGGPNRPKGGGGKRAKNTKGQKNKGGGGHGTGGGGGPGGGGPEPAGGRAEKRGGGGTSVGKQGEGGGPGRKGGGGRGQKTNEPGEKRGKPGGPNGGGNPHKRGGGEGPKNRRENGRARG

SEQ ID NO: 108983 - protein, 85 aa, Gossypium hirsutum
  Clone ID: LIB3829-014-Q6-N6-H11.pep
VRYRKVVGSICVATAGMFTFRLCSDQGQVWSSFPHEGLPAHALGPNHTCLCLKAWLGISSRLLLLDVDELKQVIDVGSLFQQRGP

SEQ ID NO: 108984 - protein, 108 aa, Gossypium hirsutum
  Clone ID: LIB3829-015-Q1-K6-A10.pep
MGKNEDPDLQQREQNLESGNDQGRPGSCWMLFSRLSNDLSFKCVFVLFLSLSVLLPGIFWILPYRSITTGFDAKQAIKLSASVRAYFKLQKPVSELVRYVEKLEYDIY

SEQ ID NO: 108985 - protein, 154 aa, Gossypium hirsutum
  Clone ID: LIB3829-015-Q1-K6-C9.pep
VHLIKVSSSSSVVMASCIMLRCNTLSLQIVACITCQLVVVLRCRYFQYVRLCRLSAVALCSFLLAIAMVFSSTCVVGPQGCGDQQEKSQTPGSSCRYLCALVDFPFGDHILLLLSHCLFGVKLLRGCSVSPHRICVALGLKATSYSRHIKEGFH

SEQ ID NO: 108986 - protein, 147 aa, Gossypium hirsutum
  unsure (1)..(147): unsure at all Xaa locations
  Clone ID: LIB3829-015-Q1-K6-D1.pep
PTTTKQVIISTVIMTVEKAIPTWNSVPSYLTXIYNTGDNAIVTNWELSLCFTVDTLGRDTLLIGXLTADYYTRDADSPWPELIIACGTGSYTNVVYSLALGDNSASMPRSAIAIIIGLTFSYTALNMTAVAXSLAMLSTIATCAAMC

SEQ ID NO: 108987 - protein, 68 aa, Gossypium hirsutum
  Clone ID: LIB3829-015-Q1-K6-D12.pep
KCYPATDLYAVTPHLPNMSHQHIQMTYQLSSNGTTSHGSVVYHSLNLTTSKNTMCKMYNCNASTLILL

SEQ ID NO: 108988 - protein, 77 aa, Gossypium hirsutum
  unsure (1)..(77): unsure at all Xaa locations
  Clone ID: LIB3829-015-Q1-K6-D4.pep
MAAITSAVIAIAGVILGWIAIEIACKPCLEXGREAIDRSLNPDYDPDDDLQAPLNPNPDPQSHPGISSSTSSKPLQI

SEQ ID NO: 108989 - protein, 51 aa, Gossypium hirsutum
  unsure (1)..(51): unsure at all Xaa locations
  Clone ID: LIB3829-015-Q1-K6-D8.pep
EHICYAITCARLSPHSDGHSGLRHXTLHYEKLHQELGHSSTLLQXFMELTG

SEQ ID NO: 108990 - protein, 185 aa, Gossypium hirsutum
  unsure (1)..(185): unsure at all Xaa locations
  Clone ID: LIB3829-015-Q1-K6-E1.pep
XYETYAVAXKIKAPPPPAKHWLLRGIVAIQRRXLDPSHRAPIDLVTVLDVSGSMTGAKLQMLKRAMRLVISSLGSADRLSIVAFSATSKRLLPLRRMTAQGQRAARRIIDRLACGQGTSVGDALRKATKVLEDRRERNPVASIMLLSDGQDERVQSNASNQRHHSSHASSTRFAHIEIPVHAFGF

SEQ ID NO: 108991 - protein, 77 aa, Gossypium hirsutum
  Clone ID: LIB3829-015-Q1-K6-F10.pep
ISSNSLITLKSCSYMFFHYTYYFTATLRKKEELDSCQFFPLIWINTQVCFFCMTIFFYMFGNQIFICLYTIASSHFD

SEQ ID NO: 108992 - protein, 121 aa, Gossypium hirsutum
  unsure (1)..(121): unsure at all Xaa locations
  Clone ID: LIB3829-015-Q1-K6-F3.pep
MGLTLHTPGMSFPGKVHEPGNFTNMKVEMTVETYNIYVFNVLKQVHAHIRRLHAKVCGIMISFLNDIFXKLAQKVLRLALHSMLSTLSYREIHTDVRLVLPGELAAHDVPEGTAAGTKFTS

SEQ ID NO: 108993 - protein, 106 aa, Gossypium hirsutum
  Clone ID: LIB3829-015-Q1-K6-G2.pep
NRALHEDFCGTRKSAPLFYIWGANALVCSKYNWTCPIQIDSHFSNLVTLQALKAYVTSCRAPNHRMCDEKLHPHADQVNGSIQSSAENDDLLEYTDCQSDLLKATC

SEQ ID NO: 108994 - protein, 189 aa, Gossypium hirsutum
  unsure (1)..(189): unsure at all Xaa locations
  Clone ID: LIB3829-015-Q1-K6-H10.pep
SVQAFGADQFDTQDPEECKAKSSFFNWWYFGMCAGTLTTLSILNYIQDNLSWVLGFAIPGIVMAVGLVVFLLGTMTYRYSVKGDEESPIVTVGRVFILAVRNRKTSYSAIAAEEEARGILATESSKQFKFLNKALLAPDEVCSIXKVEEAKAVIRLAPIWATSLIYAIAFAQSSTFFTKQGATMDRSTA

SEQ ID NO: 108995 - protein, 193 aa, Gossypium hirsutum
  unsure (1)..(193): unsure at all Xaa locations
  Clone ID: LIB3829-015-Q1-K6-H11.pep
ALSALVYPLLTQXDLSHVFSSVRRDLNFIDHNNDLGWKEDQRFRPIVVDPGLYLARRTKIFYATEKRAMPDAFKIFTGSPWVVLSRSFLEFCIFGWDNLPRTLLMYFNNVMLSEESYFHTVICNSPELKNTTVNSDLRYMIWDNPPKMEPHFLNISDYDQMAQSGAAFARMFKEDDXCVXDXVDEKILKRKRN

SEQ ID NO: 108996 - protein, 60 aa, Gossypium hirsutum
  Clone ID: LIB3829-015-Q1-K6-H12.pep
GFFILYVLFFACFFFFIFFFFIFFFFFFFFFFFFFFFFFFFFFFFTIKLYDNFMVTSSLN

SEQ ID NO: 108997 - protein, 198 aa, Gossypium hirsutum
  Clone ID: LIB3829-015-Q1-K6-H7.pep
PRPRSAESLLPATSDISHLEMQKSSHKVHKQENPNCLELMDDFLEMEKLACLPNDAGGANDVSSHPGNYGNYRAEGNMSRNAVQDQDIFSVQEFGFSPSSKQGSSSARSSTTELQHDVENLPFQKLQSMISTIFESQTKDSNLGKVLEDIKCAILEIQGSLPQHCLYEGVQAGHGPSDPKDVSGQSLIFLDEENITKK

SEQ ID NO: 108998 - protein, 161 aa, Gossypium hirsutum
  Clone ID: LIB3829-021-Q6-K6-C1.pep
CYSWGTFKYGERMENWMMRSGTSYTYGCLDVILNKLGMKEATFLPTNKVTDDEQGKLYEMGVFDFRTATMFLAPLVTVILINIAAFVGAVVKALVVDDDGDQYWEKMFGQMFLSFFILISNFAVIEGMIIRRDKAKIPLSSTLWSVVFSMFILLIGSVIVG

SEQ ID NO: 108999 - protein, 96 aa, Gossypium hirsutum
  unsure (1)..(96): unsure at all Xaa locations
  Clone ID: LIB3829-021-Q6-K6-C3.pep
LTGINMGGAVXPTNILWVNPDCGLKTPFFFVVKPPLIGGVVVQXLLPIYPXIDKSPLLKCYAYHFYNKKNWCNVICLSLNNFVWWFDLCYMPLDVL

SEQ ID NO: 109000 - protein, 194 aa, Gossypium hirsutum
  unsure (1)..(194): unsure at all Xaa locations
  Clone ID: LIB3829-021-Q6-K6-D6.pep
AFGSLANVYIQTLRXPSKKLHHYYESFQRWAATXERGDAMSEXMDLLSDPRVENEVSSCRAGAEISCIIKDLLDASTGMDGTKALAKYLSIGKQFYREASELDXKKIHHFEAGIRRPYFHVKELDISQLENWHEYLNFVDMHGDFDWAVKLYERCLIPCANYPEFWMRYVDFMESKGGREIANFALARAAEVFL

SEQ ID NO: 109001 - protein, 58 aa, Gossypium hirsutum
  unsure (1)..(58): unsure at all Xaa locations
  Clone ID: LIB3829-021-Q6-K6-E1.pep
HDFFFQLLIDYMLKAIFRIPNFDHNQLGVNDSLLLEXACPLNPTTSAPPPPELPPIDQ

SEQ ID NO: 109002 - protein, 55 aa, Gossypium hirsutum
  Clone ID: LIB3829-021-Q6-K6-E3.pep
RTGQASTRYHYFMCPLSTLSKEEGESPAHLSDWVTENQKLPICCEKSVRITGSTD

SEQ ID NO: 109003 - protein, 66 aa, Gossypium hirsutum
  unsure (1)..(66): unsure at all Xaa locations
  Clone ID: LIB3829-021-Q6-K6-F2.pep
WVSPGGGXTYLCQMNSLDSTYRETSFFFFFHRPKPFVWVVGGKXXQXXXFILLRESNPXRNFIVXF

SEQ ID NO: 109004 - protein, 162 aa, Gossypium hirsutum
  Clone ID: LIB3829-021-Q6-K6-F4.pep
MTSQSVSLPPASRRNSYRRGPSAPEKSHTSDNAKPTSPSSVGGERTVKKLRLSKALTIPEGTTVSEACRRMAARRMDAVLLTDANGLLSGIITDKDIATRVIAEGLRPEQTVVSKIMTCSPIFVTSDSLAIEALQKMVRGKFRHLPVVENGEVIAMLDITKC

SEQ ID NO: 109005 - protein, 192 aa, Gossypium hirsutum
  unsure (1)..(192): unsure at all Xaa locations
  Clone ID: LIB3829-021-Q6-K6-F5.pep
PIVQHFAEDVDLKNEFHCDMKFYSADELAQHVPTCKYRSMTCQNXGCYAKYSISQMGNHDSVCLYKMIPCEQNCSASLMRRDMDRHCITVCPMKLVNCPFYSVGCKSAIPQCKIEEHRSSDFHSHLLYILQGIHKEASVEVLRKRVEQLLQKYSSKLANIRDLRSLTYKVKDLDAKLGPLKVCAINEVDVAT

SEQ ID NO: 109006 - protein, 193 aa, Gossypium hirsutum
  Clone ID: LIB3829-021-Q6-K6-F6.pep
FFVEETVPPWGYRKLLGAVVVIAANAGGAWTPIGDVTTTMLWIHGQIFTLQTMKGLIIGGLVSLTVPLALMSLTSEVNGKGQDSPNILASQQMAPRGQLVFCVGIGALVFVPVFKALTGLPPFMGMLFGLGVLWILTDAIHYGESERQKLKVPQALSRIDTQGALFFLGILLSVSCLESAGLLRELANYLDAH

SEQ ID NO: 109007 - protein, 200 aa, Gossypium hirsutum
  Clone ID: LIB3829-021-Q6-K6-H4.pep
LAYESIAFNRRGTLLAAGCSDGSCVIWDFETRGIAKELKDRDCSAAITSVCWSKYGHRILVSAADKSLTLWDVVSGQKVTRIVLQQTPLQARLHPGSSMPSVCLACPLSSAPVIVDFSTGDTTALPVTVPDMGNVVAPPSRNKFPDGAPYTLTAACFNKNGDLVYVGNSKGEILIIDHKNVKVLAMVPISSGAVVKNIVF

SEQ ID NO: 109008 - protein, 161 aa, Gossypium hirsutum
  Clone ID: LIB3829-022-Q6-K6-B4.pep
VLTPGAWGDNMISLNSTLQACLWERGSPFLPCKTRSGLLVAKAHSFMMWLKDSPLGGDLELKNAPSFPELNSMQLIEGCFIRRGLVPAFKDITERLGLVRPKKFARLALLSDEKREKAIEAYIEGGKEKLEKLKSKVGSKRTRVVKETQKEKIYKETFVKS

SEQ ID NO: 109009 - protein, 99 aa, Gossypium hirsutum
  unsure (1)..(99): unsure at all Xaa locations
  Clone ID: LIB3829-022-Q6-K6-E3.pep
IYRKEGCEILLLVPGVHKKMSLLNMPSATVKLSRRFGVPPPLVAYRNVLSKIQAMDGLVIHEFFIRFMQKNYLCHWVFGVIGTIKCTPHPSPQNIDMVX

SEQ ID NO: 109010 - protein, 79 aa, Gossypium hirsutum
  unsure (1)..(79): unsure at all Xaa locations
  Clone ID: LIB3829-022-Q6-K6-H1.pep
VICLGGGGALXIFTSIILGEMNLYYRCHRFYKTRFRSPLLIKVLFLFQFIFILIPNVQMIMPYGRMVFMVLQLSACSNK

SEQ ID NO: 109011 - protein, 163 aa, Gossypium hirsutum
  Clone ID: LIB3829-022-Q6-K6-H4.pep
MDYSRENVVHVIPTNDNWVPNSSVPSVWATEEDGGGWNNQETSTDTLLSNSDQPPNKKPRNSQDLNTRSRAIGKMFFKTKLCCKFKAGTCPYISNCNFAHSTEELRRPPPNWQEIVAAHEEEKGILSEPREEFQIPSLGSTSFSGETQRSYKGRHCKKFYSEE

SEQ ID NO: 109012 - protein, 181 aa, Gossypium hirsutum
  unsure (1)..(181): unsure at all Xaa locations
  Clone ID: LIB3829-023-Q6-K6-B3.pep
GKLMNTIGERLTILGGGHMDAYFERMAKLSNNMKLSSXIRFMLKDAMXVRKNKWQQRRKVEGPKKIEXVHRDAAQERQAQSGRLARGPGFNATXRRAPMDFSPRGPMLSSPVSQMSSFRGMQGQPHGFGAQDVRMDDRQSLESRTLSVPLPQRPTGDDSITLGPHGGLGRGMSFGGPPVMS

SEQ ID NO: 109013 - protein, 190 aa, Gossypium hirsutum
  unsure (1)..(190): unsure at all Xaa locations
  Clone ID: LIB3829-023-Q6-K6-C1.pep
LLLSLQERXLETPPASPSSPQCQSPGYLSDDGSPRRRGKADLSVFKDFVEDCLGCEPKSLERHAKPKPQSSNDIQVEKFSGLRIRKQLVSPAKLSEHLSDIRFVRLPTLKNLLVGDTLYGCWATIGVLIEKGIPKTSSIGKSYSIWKIGCLDKNTVSLFLFGDAYEQNSKEXVGTVFALFSCTVRKDTKG

SEQ ID NO: 109014 - protein, 145 aa, Gossypium hirsutum
  Clone ID: LIB3829-023-Q6-K6-C5.pep
MAALSIGTHFSPSCRFKNRSLHAPSVYSLPSFGTSLYRSRAPRLLSNGVLARAEDKARGSSSPSQRQVQPNNEEQIKGLSSESGTCDPLCSVDETSSLEFEAAYQPKTDLLKTIAVFTAALTGTLAINLTWVTDHQDIAMALLFG

SEQ ID NO: 109015 - protein, 187 aa, Gossypium hirsutum
  unsure (1)..(187): unsure at all Xaa locations
  Clone ID: LIB3829-023-Q6-K6-E5.pep
VHNGLLRGWGWVLKAECDILKELVERXGDYTLTFAGHSLGSGVAAMFFFLVVQHHDRXGGGGDRRRIRCYAIAPARCMSLNLAVRYADVINSVVLQDDFLPRTATPLEDIFKSVFCLPCLLCMRCMRDTCIPEEKMLRDPRRLYAPGRLYHIVERKPFRLGRFPPVVRTAVPVDGRFEHIVLSCNAT

SEQ ID NO: 109016 - protein, 113 aa, Gossypium hirsutum
  unsure (1)..(113): unsure at all Xaa locations
  Clone ID: LIB3829-023-Q6-K6-H3.pep
SLSIYIYILGGGNXLIKLIKKKGRKRWXHVFFFFFXXMXXYWGGGGXHXXKXPLNPVAGSTLYRWLRXKIRRAGLNFLLPIACSFPVHCSSFFFHLTPPLPFLLPFFSSLTLF

SEQ ID NO: 109017 - protein, 194 aa, Gossypium hirsutum
  unsure (1)..(194): unsure at all Xaa locations
  Clone ID: LIB3829-023-Q6-K6-H6.pep
VLVXGHRILAWGFSNSNSSIGNALVTTNLPSFVPPKXPVFEXTGFIVGVTIGAVLLVSFCMARYFLLVRFRRKRNGKKDDIETWELEYWPHRIGYQEIYAATKAFSDENVIGSGGNGNVYKGVLKEGQEVAVKKISHESEHGIREFLAEVSSLGRLKHRNLVGLRGWSRNDKGSLILVYDYMENGSVDKRIFDC

SEQ ID NO: 109018 - protein, 190 aa, Gossypium hirsutum
  Clone ID: LIB3829-024-Q6-K6-B5.pep
GFHARLARRWMRLDNFYQQLIDEHLNPSGLKPEQEDILDVLLQTWKDRDFLFDLTLDHGGGVIMNVLFAGTETTAVTVIWVMSFLMKNPDCLKKAQEEVRGLIGKKGFLNEDDVQALTYLQAVVKETFRLQPAVPLLLPRETLRKCCIGGYKVPANTLVHVNAWAIGRDPEAWKNPEEFCPERFIGSSID

SEQ ID NO: 109019 - protein, 163 aa, Gossypium hirsutum
  Clone ID: LIB3829-024-Q6-K6-C5.pep
MENNPGAAGPSSAWVVPSQSMSQPLISINMNSTNLSSQLISETSAGGGIVGPESAPWQENRLLVDDSSFRCVFPCEGNERPSQGLSLSLSSSNPTSIGLQSFELRQTSHSNHDDQPDDMRFIGSSSRDGFFGKPAIVQQHEGQFQIRGSRYLNAAQELLNEFC

SEQ ID NO: 109020 - protein, 199 aa, Gossypium hirsutum
  unsure (1)..(199): unsure at all Xaa locations
  Clone ID: LIB3829-024-Q6-K6-D4.pep
WXIYSIFQASNSPTNHKGAVAVRQPYIRIVGMEETNEASSRGPATFTQEEVEEFKKFASNQDTYEAICSKVAPSIFGHEDVKKAVACLLFGGARKNLPDGVKLRGDINVLLLGDPSTAKSQFLKFVEKTAPIAVYTSGKGSSAAGLTASVIRDSSSREFYLEGGAMVLADGGVVCIDEFDKMRPEDRVAIHEAMEQQTI

SEQ ID NO: 109021 - protein, 54 aa, Gossypium hirsutum
  unsure (1)..(54): unsure at all Xaa locations
  Clone ID: LIB3829-024-Q6-K6-E4.pep
YSLFISLSSLENIXXFAIKPGXLGXGSLRVVVXDXRQKEKIDYAKATKACDKIV

SEQ ID NO: 109022 - protein, 128 aa, Gossypium hirsutum
  Clone ID: LIB3829-024-Q6-K6-F3.pep
RGRKRERGKGKGKRREEKKKREGGKRKGERKGNGEEEKRKEERRGGKRKKKRREGKREGDKERAEKKKRKPNQERERKQKKNTQSRHGQGKGEGRTRSKPSTTEKEKAVTNSIQTNREERERPQRPPK

SEQ ID NO: 109023 - protein, 75 aa, Gossypium hirsutum
  unsure (1)..(75): unsure at all Xaa locations
  Clone ID: LIB3829-024-Q6-K6-G1.pep
FTTVXVLLMLFILLFISIFVHFKXXXFXSPPPPTXXSXXXKKKNSGWQFNGSGFSQLKSYLRPPQSKGCMRQLVF

SEQ ID NO: 109024 - protein, 44 aa, Gossypium hirsutum
  unsure (1)..(44): unsure at all Xaa locations
  Clone ID: LIB3829-024-Q6-K6-H3.pep
MNQPKIKGRVGKYQVGRTIGEGTFAKVKFGXNSETGEPVGLMIL

SEQ ID NO: 109025 - protein, 152 aa, Gossypium hirsutum
  Clone ID: LIB3829-024-Q6-K6-H6.pep
AYFYREKSAPKRNIPEYGGAESSFSSMSDPSDTSSGSSKNVVGGVQDVVDLREDVYEEESKKLNVKLVSARQVFDSNVEEKEEKSESQSDFRNDTFVTRVHESKKNFQRLKKNEPKNAYERLMSVGRSFASKHGEKEDDNDCVVLSSKQGFK

SEQ ID NO: 109026 - protein, 55 aa, Gossypium hirsutum
  Clone ID: LIB3829-029-Q6-K6-A5.pep
CCVIPTLTGQMVNQVTPDNSLPHISYYFRGPPFGPPPLPRDPYSCLRVDDKNLPL

SEQ ID NO: 109027 - protein, 184 aa, Gossypium hirsutum
  Clone ID: LIB3829-029-Q6-K6-A6.pep
MDDAEGGLSFDFEGGLDAGPPAPTASMPVVNSDPSAANNTNNFTAPGGVQASINDPVANQGGGAGRRSFRQTVCRHWLRSLCMKGDACGFLHQYDKSRMPVCRFFRLFGECREQDCVYKHTNEDIKECNMYKLGFCPNGPDCRYRHAKLPGPPPPVEEVLQKIQQLSAYNYNNKFYQQRNAGFP

SEQ ID NO: 109028 - protein, 143 aa, Gossypium hirsutum
  Clone ID: LIB3829-029-Q6-K6-C5.pep
MAEITEATNMETTPVENNNELALITPETQPKRRKKKSMAWEYFTIETVSAGCRRACCNRCKQSFAYSTGSKVAGTSHLKRHIAKGTCPALLHDQYNNQLTPYNPKTGGSEPRKRRYRSPSSPFIPFDQDRCRHEIARMIIMHE

SEQ ID NO: 109029 - protein, 68 aa, Gossypium hirsutum
  Clone ID: LIB3829-029-Q6-K6-F2.pep
VLLKRAAPFFFFFFFFFFFFFFFFFFFFFFFFFFFFFFFFFFFKGKRVTHIYFLSQHYIISHILRIQS

SEQ ID NO: 109030 - protein, 187 aa, Gossypium hirsutum
  Clone ID: LIB3829-029-Q6-K6-G2.pep
WKIFINRFRKREKLGKIDKAIQNGREVDRRNIEYAAMDQLVQMANKKRLACRGSNSSKSAVRKVSKQVALSFIKRTLDRCRKFEQTGNSCFSEAALQDIMFSVHPCSNEAKSVEGIGSGTASNTCNETSNHQAEARGSGAVCGTFERYDSPDALLAVHSTEHAVSKYGSTLNKGRKREVLIDDVVGS

SEQ ID NO: 109031 - protein, 115 aa, Gossypium hirsutum
  Clone ID: LIB3829-029-Q6-K6-H5.pep
YYYCNGPKLPGPRPINNKQKRDQNSPIFKPKIQKKIETQTLNPKQTPTLTLSCAVPTGHTPPSRAGRHHPATCATLSRHVRVVLDHAPCVVLTPWRTLLRRLQVGGLKAWKLAFG

SEQ ID NO: 109032 - protein, 61 aa, Gossypium hirsutum
  unsure (1)..(61): unsure at all Xaa locations
  Clone ID: LIB3829-029-Q6-N6-B3.pep
QSFIFPTFEKHLGFLFEYYTXTPLLSTPTHAKMLQPIFKTIYDKKSNQLLQSFEIYIYVCK

SEQ ID NO: 109033 - protein, 124 aa, Gossypium hirsutum
  Clone ID: LIB3829-029-Q6-N6-F3.pep
KHPHFIFRFPRKKIKFTPLEDWKQNMLLSPHIQFTRIWIFIPPPPPYLYIWVRGLIISIAFPGYHDLPEQPFLGPATGPLVGVFSRGLRLACFYSQPCSPAPMIKFLPPPGGGIIGVGPPQWNG

SEQ ID NO: 109034 - protein, 63 aa, Gossypium hirsutum
  Clone ID: LIB3829-029-Q6-N6-H3.pep
SSPQNGLLFCLPGSIQRGRKRKKRDPPPYLKGVKWGLHNWNRMGQGLRSAPGAIGEPGNFPRG

SEQ ID NO: 109035 - protein, 89 aa, Gossypium hirsutum
  Clone ID: LIB3829-029-Q6-N6-H5.pep
QKRDPNRPIFKPQIPKKIETQTLNPKKTPTLTLFWAGPKGQNPSLGGGSHYPQKGAFFLPPVKNGPDNPPGGGPTPGEELSFPVKKKGV

SEQ ID NO: 109036 - protein, 199 aa, Gossypium hirsutum
  Clone ID: LIB3829-030-Q6-K6-C1.pep
QQQQQQQSSQQLLSPAGSLLQPQMLQQQPTHQQSQPLQQLPLSQSQSQPLGSNGFSTSMPVQPQQVSVNQPQIHKPFTAMRTHSGLTDGDAPSCSTSPSTNNCQVSSLNFLNKNQQVPSILVSDPLVEPANTLVQELQSKPDIRIKHELPTSKGPELSKYKSTVTDQLEASSSETSYCLDAGTIQHNFSLPTFLEGDLR

SEQ ID NO: 109037 - protein, 52 aa, Gossypium hirsutum
  Clone ID: LIB3829-030-Q6-K6-E3.pep
SVSLLGFKRLKSNFPQFNPFSELDKYEGRSAHCFGTVNKVVHTQGFYAFVIS

SEQ ID NO: 109038 - protein, 171 aa, Gossypium hirsutum
  unsure (1)..(171): unsure at all Xaa locations
  Clone ID: LIB3829-030-Q6-K6-E4.pep
AKNRQRLRSQFGNIGDDMSSYLPXGFISRTRDRGVIVPQWAPQVEILSHPSCGGFFTHCGWNSAIECITNGLPMIAWPLYAEQRMNATLLTEEMGIALRSETLPSKGVVGREEIEKMVRKIFVDEGGRQMRARVKELKLSAETAWSNGGSSYDALAKMVKHSQKKAIEIDV

SEQ ID NO: 109039 - protein, 49 aa, Gossypium hirsutum
  Clone ID: LIB3829-030-Q6-K6-G6.pep
KRRNWKNPGVTKLNRFEKNPLFASWRKSKKARTDRLSKKLPTLNGKWNP

SEQ ID NO: 109040 - protein, 92 aa, Gossypium hirsutum
  Clone ID: LIB3829-030-Q6-N6-A1.pep
TRKITHAIHPGSLRKATYEKIDVSGLEIPTEIEGEPSEILRPENTWGDKKAYKNTLLKLGCLFKNNFETFTNYKIGKDTKLTQEILAAGPNF

SEQ ID NO: 109041 - protein, 95 aa, Gossypium hirsutum
  Clone ID: LIB3829-030-Q6-N6-B4.pep
PVDLSTYLPQEVFMGFFGSTSNETELNSVKSWAFSDTDIGGNGNQLWVWIMVPVASVGILVGVAICLCLRRLYKEEDLVDQGAQLQGNIEHEIKW

SEQ ID NO: 109042 - protein, 85 aa, Gossypium hirsutum
  Clone ID: LIB3829-030-Q6-N6-D1.pep
PDPPRKHHQNPPHHLSLPINNANTTSSNSKPSKYEAVPPPIPKRPVRPPKPVDEDLYKIPPELLHSSKRKKMPGFFSCLVPACAT

SEQ ID NO: 109043 - protein, 58 aa, Gossypium hirsutum
  Clone ID: LIB3829-030-Q6-N6-D2.pep
LNLREGPGHPGLLYIVPFILGPFITLGKKRGDLKPLWTRGEPERPCPHVQLQPLEQRE

SEQ ID NO: 109044 - protein, 125 aa, Gossypium hirsutum
  unsure (1)..(125): unsure at all Xaa locations
  Clone ID: LIB3829-030-Q6-N6-F2.pep
GGSKKTPSPNPPKRPKAQATTQTQKKFLKPQSISXGPFLGDQPRPADNDAQVPGQNSPGPPAISRAVLLGKDADQGLPASDLINRFSFQXAQHDMSNLKNIAGETGKKLSSFASTFMSDLQDRML

SEQ ID NO: 109045 - protein, 63 aa, Gossypium hirsutum
  Clone ID: LIB3829-030-Q6-N6-H6.pep
GKKQPFYSLILSRSIGNPKTKQKKTPSPITQLKKKKKKGGGFGGLNLRPTFKQKGFLGGEETN

SEQ ID NO: 109046 - protein, 199 aa, Gossypium hirsutum
  unsure (1)..(199): unsure at all Xaa locations
  Clone ID: LIB3829-031-Q6-K6-B4.pep
LXXTXSGRPYILLLPLIEGPFRASLQPGTDNNVDVCVESGSTKVAAASFRSVVYVHVGEDPFILVKDAMKVIRTHLGTFKLLEEKTPPGIVDKFGWCTWDAFYLTVHPQGVWEGVKGLVDGGCPPGLVLIDDGWQSISHDEDPITKEGMNCAVAGEQMPCRLLKFQENYKFRDYVSPRSLANGSTNMGMGAFIKXLKEE

SEQ ID NO: 109047 - protein, 198 aa, Gossypium hirsutum
  unsure (1)..(198): unsure at all Xaa locations
  Clone ID: LIB3829-031-Q6-K6-D2.pep
SSFVRQLNTYGFRKXDPDRWEFANEGFLRGQKHLXERLKRDKNVLMQELVRLRQQQQTTDNQLQTVGQRVQVMEQRQQQMMSFLAKAMQSPSFLGQLVQQQNESNRRITGANKKRRLPRQDEENLAGENGAVSAKGQIVKFQPSLNGAAKAMLHQIMKMNTSPSLDPSINNSGSFLIDGVPPSNAPDSRSSSSRISGV

SEQ ID NO: 109048 - protein, 148 aa, Gossypium hirsutum
  unsure (1)..(148): unsure at all Xaa locations
  Clone ID: LIB3829-031-Q6-K6-E1.pep
TPLLLNTILKHVWNHRPEVLQLFHNLLTYHHSYVYFDHSFDHAIEVRDYVRDYTIVYSLLYRMLYLSLHTTAIIFDRIVDRCEPDGKPKKVLKMFLHGRXHDWRHDKTTFNTICEAICEDKPGDKARILIKRLKGKVEADDASDNASG

SEQ ID NO: 109049 - protein, 118 aa, Gossypium hirsutum
  unsure (1)..(118): unsure at all Xaa locations
  Clone ID: LIB3829-031-Q6-N6-B6.pep
QKKIQFITSSILAIIPLYKGYTIIMHITQTTITIGVYYTQAFPPFPLVFTIPRFRGFFGGLLNWKIGGPHNRLTPFFKLNRAPVLYPLLHSGXTFPISPSFKKLGPGKGPTSSFLLLS

SEQ ID NO: 109050 - protein, 70 aa, Gossypium hirsutum
  Clone ID: LIB3829-031-Q6-N6-D2.pep
INDVFWEKFLATSPLTGDTDEISSSSLENGANLEQQQAPVRQENGWDGIHHMNHLTEQMGLLSSNGQIRG

SEQ ID NO: 109051 - protein, 39 aa, Gossypium hirsutum
  Clone ID: LIB3829-031-Q6-N6-D5.pep
DVLSKPWLPLPIGLKPPSTDGVLVELQRQGVPKIPPFCA

SEQ ID NO: 109052 - protein, 118 aa, Gossypium hirsutum
  Clone ID: LIB3829-031-Q6-N6-E6.pep
GQRSPINKKKDDKEEVLVLQNIQLDRNDSVQFDVSINDDEDDDNPCKPEDAEFVGSFSNLPHGDDCHSEAMLSTNLYLPLSDALEDLKIPSEDRFIVVTLVPKEGEVSIGNIKIDYVC

SEQ ID NO: 109053 - protein, 95 aa, Gossypium hirsutum
  Clone ID: LIB3829-031-Q6-N6-H6.pep
LELQRSVRQEVSAALNRSAGEKVLSAEPSEDGSKWGHVRKGTCCVCCDTHIDSLLYRCGHMCTCSKCANELVRGGGKCPLCRAPIVEVIRAYSIL

SEQ ID NO: 109054 - protein, 91 aa, Gossypium hirsutum
  Clone ID: LIB3829-032-Q6-K6-C4.pep
FSPYIWLTLVCFYSKLWKGVDMLKSEELAKGIQDCVMKIVKKREDKFVNGEADSFGNDFLGLLVNAYHDSDENNRLSMEDLVDECKTFYFA

SEQ ID NO: 109055 - protein, 67 aa, Gossypium hirsutum
  Clone ID: LIB3829-032-Q6-K6-D1.pep
FRKLASCSTSPLAEGPEFVDNERRLWNYLIKNPDWRTTFPMRQPRVFERTGDGCWKRAGFSSQGQGT

SEQ ID NO: 109056 - protein, 126 aa, Gossypium hirsutum
  unsure (1)..(126): unsure at all Xaa locations
  Clone ID: LIB3829-032-Q6-K6-D5.pep
XTVRDSAVSVILKKIXDGVLVDELLAILAMLSTHXKAIEEIGELGGVPCLLHIIRESTCERNKENCIAILHTVCLNDRTKWKALREEESTHGTISKLAQDGTSRAKRKANGILERLRRAVNITHTA

SEQ ID NO: 109057 - protein, 181 aa, Gossypium hirsutum
  Clone ID: LIB3829-032-Q6-K6-F2.pep
MTKTPKHPSLLGLISSIWLSNFLHKQKFKFRILPYKIEDPIIFSPSKQTPLPSPFWKMEENGNRAEAVRLLGIAEKLLQNRDFNGSRDFAILAQETEPLLDGSDQILAVADVILAGEKRINNHQDWYSILQIDGRSEDNDLIKKQYRRLALLLHPDKNKFPFADHAFQLVADAWAVLSNSS

SEQ ID NO: 109058 - protein, 83 aa, Gossypium hirsutum
  Clone ID: LIB3829-032-Q6-K6-F4.pep
VYERQLITPIIQINIVGILLGKLKYGRYSTRLNPISQSQRNGKRISLPTIQHISLTPTIIHFTRCGNRISNLQVIVEGKGTDI

SEQ ID NO: 109059 - protein, 55 aa, Gossypium hirsutum
  Clone ID: LIB3829-032-Q6-K6-G4.pep
QMKALTHIKQATFLSLLPHQVHILSKYIHMYMFCCEKDLVFVLLVTVVFCPATRT

SEQ ID NO: 109060 - protein, 79 aa, Gossypium hirsutum
  Clone ID: LIB3829-032-Q6-K6-H1.pep
SVPSPKPAKRLGPMMHPSLWGVGENSRHLMRDEICLDVMVRGKFSHKSSTKITCISAGSSTCKTIEPATTSWTLDLSSR

SEQ ID NO: 109061 - protein, 192 aa, Gossypium hirsutum
  unsure (1)..(192): unsure at all Xaa locations
  Clone ID: LIB3829-032-Q6-K6-H5.pep
QXQXVRXXDFRAFWLARNERIVDWLLYESSSIICLQEFWVGNEELVHMFEERLSAAGYKTFKLARTNNRGDGLLTAIHQDYFKVLNYRELLFNDCGDRVAQLLHVKSVVPFSINQNNCVEQEILIVNTHLLFPHDSSLSIARLHQVYQILLYLETYQQENKLTQMPVILCGDWNGSKRGHVYKFLRSQGFVS

SEQ ID NO: 109062 - protein, 77 aa, Gossypium hirsutum
  Clone ID: LIB3829-032-Q6-N6-D6.pep
RAHVNQHHPQPNSSDARSRISKLAEEKNPPIHQNKSLQQKLELLRRKARKGHTGIPLMYVILVGLIGVILGYLLKRT

SEQ ID NO: 109063 - protein, 126 aa, Gossypium hirsutum
  Clone ID: LIB3829-032-Q6-N6-F2.pep
LTTTTIPTNLTPNRCSVSASALFFFLGSSKSSGTLCYNLESSRITIRFILNQKATKKYRISLPIKPHRGFFLGLPLFLEPDFDTFRPETTATLFIFSTTFVAVVEGINEGGVGTGAAADTGAGMGA

SEQ ID NO: 109064 - protein, 46 aa, Gossypium hirsutum
  unsure (1)..(46): unsure at all Xaa locations
  Clone ID: LIB3829-032-Q6-N6-F6.pep
MNAWIFIFXPHILTDKRLQDSVRPSCDCLPTWLKGDFFYDTPYTCP

SEQ ID NO: 109065 - protein, 164 aa, Gossypium hirsutum
  Clone ID: LIB3829-032-Q6-N6-H1.pep
RLEETMRAKQMLATMSHEIRSPLSGVVSMAEILATTKLDREQRQLLDVMISSGDLVLQLINDILDLSKVESGVMMLEATKFRPREVVKHVLQTAAASLRKILTLEGNVADDVPIEVIGDVLRIRQILTNLISNAIKVTHEGKVGGKLYVVPEPPFAKEGSQNGG

SEQ ID NO: 109066 - protein, 78 aa, Gossypium hirsutum
  Clone ID: LIB3829-032-Q6-N6-H4.pep
SEPARMIEKEKALKHLRRTMVPHARPLPKFDHPFCPQKSSKETTKPKPPHLRVLQRIERKKRISSFATPTSSPATLMR

SEQ ID NO: 109067 - protein, 59 aa, Gossypium hirsutum
  unsure (1)..(59): unsure at all Xaa locations
  Clone ID: LIB3829-032-Q6-N6-H5.pep
DSNEGNEEEPVGFTVKNAALFPPXEVEKGIWPENYSLSDHARLTAVFSPVRLRCPRRSP

SEQ ID NO: 109068 - protein, 175 aa, Gossypium hirsutum
  Clone ID: LIB3829-033-Q1-K6-A2.pep
DSVGLPSVGAAAEPPPKRNRGRPPGSGKRQIDALGGVSGVGFTPHVITVNTGEDIASKITAFSQQGPRTICILSANGAVCNVTLRQSVLSGSMVKFEGRYEIISLSGSFLVSENSGSCSRTGGLNVSLAGSDGRVVGGGVVGALQAASPVQVIVGSFIADGRKQNLDVFKTVPLM

SEQ ID NO: 109069 - protein, 91 aa, Gossypium hirsutum
  Clone ID: LIB3829-033-Q1-K6-B10.pep
PVSFKLKKYFAETFTSQLLLVSYHRYPKMAEPSINASIPLLFLKVHVFDADLYREHPKIFLKTLTNKQAYLNTCGYNVKQYLMKKVMACNS

SEQ ID NO: 109070 - protein, 54 aa, Gossypium hirsutum
  Clone ID: LIB3829-033-Q1-K6-B8.pep
QCKAYIYLSSNVFSSMVLPYRYSVSYVEPTITFICVSSTNNVLIIFSSYKSIVS

SEQ ID NO: 109071 - protein, 173 aa, Gossypium hirsutum
  Clone ID: LIB3829-033-Q1-K6-C7.pep
NDVTLGQLPVTDKLVYWFLTRVLTSQDLSDAKKDPAYITKASLEAIKGFPEEIVELVKNTEPNTLYLTELRYRAPWDLVRTKFRKGTVVVAGDAMHAMCPFISQGGGASLGDAVVLARCLSEKLKQAAEGGGKRLVEEALDEYVRERRMRVFWLSLQTYFIGLVQDNTSKVKK

SEQ ID NO: 109072 - protein, 56 aa, Gossypium hirsutum
  Clone ID: LIB3829-033-Q1-K6-F1.pep
GPIQILKYGSIVDATDQQCTIAIYFTFKKQTGLFLRILTTGRFGFFEDERRHFHVC

SEQ ID NO: 109073 - protein, 174 aa, Gossypium hirsutum
  Clone ID: LIB3829-033-Q1-K6-F5.pep
AFFPYRWVLMQFGAFIILCGATHFINLWTFTMHSKVVAMVMTIAKVACAIVSCATALMLVHIIPDLLSVKTRELFLRNKAEELDREMGLILTQEETGRHVRMLTHEIRSTLDRHTILKTTLVELGRTLGLEECALWMPSRTGMDLQLSHTLNYQIQVGSTVPINLPMVNEVFNS

SEQ ID NO: 109074 - protein, 168 aa, Gossypium hirsutum
  Clone ID: LIB3829-033-Q1-K6-F8.pep
SWMDAPRFSTNHLAGIERFLSFAIEKSVFNGKIYCPCYLCNNRILHESHIVGEHLRLHGIIKEYKHWIFHGECIERTSVQTDQTVRTSPSICTQSQDNEADLRDLITDALGINIPTLNESFDGEDDFNEAQRTTERATTLLDDCDIPLYPGCVKFSCVSSLLRLYHFK

SEQ ID NO: 109075 - protein, 163 aa, Gossypium hirsutum
  Clone ID: LIB3829-033-Q1-K6-G4.pep
QLQYLKCVIKETLRLHPILPLLLPRECGKNCEINGFEIPSKTRVIINAWAIGRDPNHWAQPEKFEPERFINSSVDFLGTNFEFIPFGAGRRICPGMLFAVPNLELPLAQLLFHFDWKLPKQEDIDMTEEFALSVRRKTDLVLVPTPYHASIIVSYKHKEDIFV

SEQ ID NO: 109076 - protein, 175 aa, Gossypium hirsutum
  Clone ID: LIB3829-033-Q1-K6-G9.pep
VLTLSMAEHPNLVKLIGFCAEGDQRLLVYEYMPLGSLENHLYELPASRKPLDWNTRMKIAAGAARGLEYLHEKMKPPVIYRDLKCSNILLGEGYHPKLSDFGLAKVGPIGDKTHVSTRVMGTYGYCAPDYAMTGQLTFKSDIYSFGVVLLELITGRKAIDETRDRSEQNLVAWAR

SEQ ID NO: 109077 - protein, 82 aa, Gossypium hirsutum
  Clone ID: LIB3829-033-Q1-N6-A1.pep
KPIILKGEEGGWGVNPRKKPQGVKAKGIQGGKERKRSQKFHPAPLKYTGGASGLKGKQGTKGQNRNIIQISRPHFKTLGETK

SEQ ID NO: 109078 - protein, 160 aa, Gossypium hirsutum
  unsure (1)..(160): unsure at all Xaa locations
  Clone ID: LIB3829-033-Q1-N6-B1.pep
GNKSPFLWVAKQGVKTKAPXPPSFRRLKPEKTTAKPQGPKHKTKQHPPQKRKKPPNAQPHKKQAPKDQKPRPRQTKKKGGPTAPGKRGRPPRGKDNKKPGEQKPTGGGANPKPKKGEPLSKKKEKTPPQGPKKKFSREPTETESQAAENLEPGGRDPQPP

SEQ ID NO: 109079 - protein, 77 aa, Gossypium hirsutum
  Clone ID: LIB3829-033-Q1-N6-E2.pep
TPLKLSQLWHFKCFNQHSNHYNNHKKASTFHSFTHHQFPPLPLPFLDSPSLKFLLLFKKMIKNLKKGCHLNKNPKCK

SEQ ID NO: 109080 - protein, 90 aa, Gossypium hirsutum
  unsure (1)..(90): unsure at all Xaa locations
  Clone ID: LIB3829-033-Q1-N6-E3.pep
IVYSHQKVDLLWMVVTSXSLVTPLIWPDVQVNGYRKQFQHQWHFDTLKQPIWGREEVCNNYVTLENSLLSCDSSANSAATLHANQLKMEL

SEQ ID NO: 109081 - protein, 49 aa, Gossypium hirsutum
  Clone ID: LIB3829-033-Q1-N6-F1.pep
HLQGLTTWKMRYCVIINAHSHGCTHALLTPTFTDPNFPYNQFYLSWAEL

SEQ ID NO: 109082 - protein, 99 aa, Gossypium hirsutum
  Clone ID: LIB3829-033-Q1-N6-G4.pep
EPERFIPSSVDFLGTNFGFIPFGAGKRICPGLLFAGPNLEVPLAPLLFPFDWKLPKPEDIDLAREFALAVRRKTDLVLGPTPYQGFIIVSPKPKGDIFV

SEQ ID NO: 109083 - protein, 103 aa, Gossypium hirsutum
  Clone ID: LIB3829-033-Q1-N6-G5.pep
ARVIGSTVGNENIGLKLVPFSNKSIGLCALMKHIQWLCAFHESRVIGFILSDQVAKPSYAFLSRPTCAKVHGLTWVVVWIRILHLPVLAVSYPFFCKFNILTA

SEQ ID NO: 109084 - protein, 177 aa, Gossypium hirsutum
  Clone ID: LIB3829-034-Q1-K6-A7.pep
DSGSTHEPMVTHPTEVREVKNSHEPSSHAPVVADASETAQALGPKSHETVTIDEVGDDSIAQPRRQNDNSNNQHVTPSAPAFDNLPDYGNDIEEQMIQAAIEASKRDAEELSNTGPWRNMSHSEDAVLEEAVSLSFKTAEQEKALREQGYCAGTSEVEASIPPKEHLGNMAVSNGRL

SEQ ID NO: 109085 - protein, 175 aa, Gossypium hirsutum
  Clone ID: LIB3829-034-Q1-K6-A8.pep
NISPSPVCSVMVELPAITENELGKETKPSSGSENITPSPVHLFAFDSTDRALTPTDDELQQSSAAERVDAKSVDVSNEVEPTAQPASSQDFAAEASNEDFAPENHGEAKVSPGIKSVADGHVERDVDPLELEASVDEDIAAVPSSMELVPGDQSKVHVQAGVAGCEGDDGIQGRD

SEQ ID NO: 109086 - protein, 54 aa, Gossypium hirsutum
  Clone ID: LIB3829-034-Q1-K6-B1.pep
QYEMIHQVLIILFLLKLQDITYLVLCQSVRLSPFSADIILKKFMIHIFYGEILI

SEQ ID NO: 109087 - protein, 172 aa, Gossypium hirsutum
  Clone ID: LIB3829-034-Q1-K6-B11.pep
WRVEFNLLGFFVCNSLYLGRPKGGARRPRSEPALPLLSSSREGDDLKFSGVLKKLGYFIDSSDGLLLCGRHPKTYFVWNPITKQQHKLPHPRVHLEELCMAFIVEDSPDDEICYRVVRAKCESRFEEVNVVTIETFLSKISTWCYSKLRCSSTISLSPWTSGTVIGDVIHWY

SEQ ID NO: 109088 - protein, 176 aa, Gossypium hirsutum
  Clone ID: LIB3829-034-Q1-K6-C5.pep
CPQNAGGNQDVSKGTPASGGDQTGSGVQPKSPSPTELLRTGESAKSDCVEVCDKEVRPSEASSSETAMQPLETAVPVSDISQDKSIEQSRSEADASKSEEKSVAATGPDNIPDSSQLSCDTTITESGKEAKGDGTDPIVEPSSNQLELSAASPTKVESDQLNQNSSENETAISSED

SEQ ID NO: 109089 - protein, 175 aa, Gossypium hirsutum
  Clone ID: LIB3829-034-Q1-K6-C7.pep
RMAARAGFNAPRLNTENIRSTDTSLNPEIRSPYLTIPPGLSPTTLLDSPVFVSNSLAQPSPTTGKFSFIPNVNDRSCIPESRDKSEDNYFEDINASSFAFKPIAESNSSFLLGATSKVTPASLPQQSFSNVEVSVQSENSQPSRSVDPRKLQQQNSNMLSLQADFLRSSTEKDTG

SEQ ID NO: 109090 - protein, 135 aa, Gossypium hirsutum
  Clone ID: LIB3829-034-Q1-K6-F4.pep
MSPDVQGENIERTQLRSLESGIAELPNQTGVLVRNMAVESISWQENTTQGGNWREPAANDERGNWQQPTYAQFNELRDNSTEVMDTNWQESSVSEHRQENPGNENGEANRPQGAQRVWHEGRSQEAVDNWSEGRS

SEQ ID NO: 109091 - protein, 175 aa, Gossypium hirsutum
  Clone ID: LIB3829-034-Q1-K6-G12.pep
EDLEVHKRMKAIGDLIQLHSPDIICFQEVTPMIYDIFRGSNWWKGYRCSISDNTASLRAYFCIQLSKLPVKSFRREPFDNSIMGRELCMTEVEVSGGETTLVVATTHLESPCPAPPKWDQMYSKERVEQAKVAINILENNPNVIFGGDMNWDDKLDGRFPLTDGWIDAWNELRPA

SEQ ID NO: 109092 - protein, 141 aa, Gossypium hirsutum
  Clone ID: LIB3829-034-Q1-K6-G6.pep
MLQDVWNAPPGFRPCKSAPTSPAKPLGVLRTRSESFHAIHKVPVGDTPYVRAKNVQLVEKDPERAIPLFWAAINAGDRVDSALKDMAIVMKQQNRAEEAIEAIKSLRSRCSDQAQESLDNILLDLYKRCGRLDDQIALLKH

SEQ ID NO: 109093 - protein, 85 aa, Gossypium hirsutum
  Clone ID: LIB3829-034-Q1-N6-A5.pep
LPFLSTLYVADPIFARAKSRLQSIKAIETRPTVRFTNTDPQAQHPPHFFYISPTSDGPTAENLASLVSLALPPGPNWTPRSSTHP

SEQ ID NO: 109094 - protein, 91 aa, Gossypium hirsutum
  Clone ID: LIB3829-034-Q1-N6-C1.pep
FLFPAGLTGFSFGKRALFAFPLVCGASLLLPPRFFPSCFRLAFFLAFCAGLFSPPETAFPLHSPPSFAPPFREPWFASPCRSGVPGPAPAR

SEQ ID NO: 109095 - protein, 57 aa, Gossypium hirsutum
  Clone ID: LIB3829-034-Q1-N6-C6.pep
NGRLCLGATLDRLWEGCCIDGTNEGHLRPEACQRQCLLVRKRRLDSSEDHTKVRMIS

SEQ ID NO: 109096 - protein, 67 aa, Gossypium hirsutum
  Clone ID: LIB3829-034-Q1-N6-F5.pep
GGPKKFLKREKKREKKKKFPGGGGEKKKGAKKKKKGAKKQKKGGEKLEKKPPKAQSKKKEKKPKFSH

SEQ ID NO: 109097 - protein, 75 aa, Gossypium hirsutum
  Clone ID: LIB3829-034-Q1-N6-G5.pep
LTSVILSEGPNLNGAAKTHIERVSVSIMEALSMYKIFSQLISSKQSLGEITPNHPPQSPKVTKSTPSVSTYLSLS

SEQ ID NO: 109098 - protein, 175 aa, Gossypium hirsutum
  Clone ID: LIB3829-035-Q1-K6-A3.pep
KPLVIERIETGDGLVKEDNTGINASESDVNTNDVEGSNLTEPRIEREVSEIEKEAWNILRGAVVNYCGNPVGTVAANDPADKQPLNYDQIFIRDFVPSALAFLLNGEAEIVKNFLLHTLQLQSWEKTVDCYSPGQGLMPASFKVRTVPRDGSPEAFEEVLDPDFGESAIGRVAPV

SEQ ID NO: 109099 - protein, 176 aa, Gossypium hirsutum
  Clone ID: LIB3829-035-Q1-K6-A4.pep
RNRGAEKLYGYLEAEALGQNIIKLVCHPKDFGFAVNIVQRVIIGESWTGLFPIKNRLGENISVVATVTPFYDEDGSVVGITSVTCDSRPFQETKFEFSAERQPKGNSSAFTRSKNTISVKLGLDPQQPLQAAIVSKISNLASKVSNKVKSRIRTGENRVDAYDHKEDATYSGVCTP

SEQ ID NO: 109100 - protein, 160 aa, Gossypium hirsutum
  unsure (1)..(160): unsure at all Xaa locations
  Clone ID: LIB3829-035-Q1-K6-C7.pep
MLLLAFVYAGLEKAKVSMQEQGDQMKTRYPNEKEMARERYEYRQEDAXLRKQEARHLNTTXAGHAVGGGIGGAGYTTAGYNRGDPAGYGGPWGHDYRGFLTVCSVYDTGRQDDLTSMVFGGDTGGAYGTTVNQDFPSAEPNNAGTKRSTRGGTQNDPYYR

SEQ ID NO: 109101 - protein, 176 aa, Gossypium hirsutum
  Clone ID: LIB3829-035-Q1-K6-D8.pep
RPKKKKKKKKKKKKKKKKKKKKKKKKKKKKKKKKKKKKKKKKKKKKGGGRFRGPKFPPPALQRIGFFLGPPNLIPGAGFYHRGAGKTPGVPQFIRLGKIPLFPGGVIRKGARPVPLSKNWPTLMGNGPPPFTGPLTPGGGGFPPRGPFTFARPLAPVLLVFSLSFFPTLAGFPRKV

SEQ ID NO: 109102 - protein, 75 aa, Gossypium hirsutum
  Clone ID: LIB3829-035-Q1-K6-E5.pep
ILRDREREKENKLSYTPEEENLVPLREEQRGRSLRKEAMKGKELSSAFNKIGKWKVAIYYFFLLNFSRVKKNSEN

SEQ ID NO: 109103 - protein, 81 aa, Gossypium hirsutum
  Clone ID: LIB3829-035-Q1-K6-F11.pep
RKCHIVRTWTVLNRQTASFEMAGRTVSATTTTGHYFSRVSWRRCLAKPTTYKACRAGSWPEPAVTGRYRTWLWMTTRSLTL

SEQ ID NO: 109104 - protein, 172 aa, Gossypium hirsutum
  Clone ID: LIB3829-035-Q1-K6-F2.pep
EDLHRYFDYSAGTEGFDFVPPAGCNSFGRYEIALLCLGMMHFHFGHPKKALEVLTEAVRVAQQHSNDTCLAYTLAAICSLLSEIGFSTTSGILGSPFSPMISVGTSLSVQQQLFVLLKGSLKRAESLKLKQLVAANHLAMAKFDLTRPLLSFGPKTSMKLRTCPIIVCKELR

SEQ ID NO: 109105 - protein, 80 aa, Gossypium hirsutum
  Clone ID: LIB3829-035-Q1-K6-G1.pep
AQSNVTQTITKTATFQTLGAPHLGSSDSAPPIACSHRPCHVHRPCTYGRLSRWPARRSHGGGNDQFWVLSRAKNLFSSFF

SEQ ID NO: 109106 - protein, 151 aa, Gossypium hirsutum
  Clone ID: LIB3829-035-Q1-N6-A1.pep
FKESVVSLDNESAKEALSKNFCSEECGEKIVDLVPEHVIPDIKSIAKVMFVSNSGQEFCEAFIGVRKEALEQPFDIFENGKLSFGVLFKMEWCSFSPEMNKWPWSMKIIFGVFLMSENRFCDQVLGEYLGMDLVANKLVIWGMLLYHMALQ

SEQ ID NO: 109107 - protein, 74 aa, Gossypium hirsutum
  Clone ID: LIB3829-035-Q1-N6-A4.pep
IQVIGAVGFMNQRLEIPNYLDPLWASIIESCWLSDPQSRPTFLELMDKLRVLQRRCTIQFQEARNSSSGSQKGS

SEQ ID NO: 109108 - protein, 163 aa, Gossypium hirsutum
  Clone ID: LIB3829-035-Q1-N6-B1.pep
VLFFYLLCVCYNLFKAFFCLSTPLCLKDCRNKHMKHGSFKQGKRGIRQAYSTTPIYINRKGMPNAPKEQNRVNLLQKSPYFPIVKKKWYHQNTPCPLWNHFCYTKGLTCRQEKPHQNLLGENTQGKKGQYSQNQSGNPTLGTPPRARWTLNLPEQPKRHNPYS

SEQ ID NO: 109109 - protein, 137 aa, Gossypium hirsutum
  Clone ID: LIB3829-035-Q1-N6-B2.pep
LREGSVTVTSNRWLTSPVASVFSLLLFQDKHHFCPWFVFSPSKYPSLEWMTEARVERCAALWKQSQSAAFHFSPLSFPSPSFDFLIFLTFFFGQHKLAYISLSIYISFSGWVAFSLSAAAFCIIVCYPFWSSQFVKV

SEQ ID NO: 109110 - protein, 123 aa, Gossypium hirsutum
  Clone ID: LIB3829-035-Q1-N6-C1.pep
ISPEEKETAFALAALMEIPLQYKAVTELGFLGQRTGKAKKVVPRPPPVSYRRPTPAPPERVPSNVSSSSPADDQTQATCPICLTNTKDLAFNCGHTTCRECGSKVSNCPICRQRITNRLRLFT

SEQ ID NO: 109111 - protein, 113 aa, Gossypium hirsutum
  Clone ID: LIB3829-035-Q1-N6-C4.pep
KKNPKKKNPNQKNPQKKHAQKRGRPKPPPLKTQKTRKTPKKKTRVPEAKQSRQRETPKKKKTLKKWGKKKGKNFQRVGKELKPSTQGKKKAQPKARTTTGANKRGPRTKKTPK

SEQ ID NO: 109112 - protein, 67 aa, Gossypium hirsutum
  Clone ID: LIB3829-035-Q1-N6-C5.pep
SVCGEVQCMRILGDYHHSSRIAFVEFTMAESAITALNCSGAVLGSLPIRVSPSKTPIRLRALLPAMN

SEQ ID NO: 109113 - protein, 87 aa, Gossypium hirsutum
  Clone ID: LIB3829-035-Q1-N6-C6.pep
EDKTIRMIFSNKLFIPARTIVKPFRPFELLSLHHNIPRILHLLPRSRREETAHAHCAFYLLVGSDGSKRELVASCPRYILSPMQLYL

SEQ ID NO: 109114 - protein, 169 aa, Gossypium hirsutum
  Clone ID: LIB3829-035-Q1-N6-G1.pep
AVPLFPSRSRSGVSGSSPASSSRVYKRFLSLVGSQIFSFPWFLPPRCPPLGVPPLVPGGCSCLGRWRRALVGVLSSVLGCGPPWVPRVPVFVVFLVPFFWPFWVSGFFCFFGFFFQLGFGFLVFSWAPPLGFFWGLGSFFVFLLVLQKTNKKKKKKKKKKKKKKKKKKK

SEQ ID NO: 109115 - protein, 104 aa, Gossypium hirsutum
  unsure (1)..(104): unsure at all Xaa locations
  Clone ID: LIB3829-035-Q1-N6-H6.pep
WVFPTVTKATMNMLLLVGPYVSYXYPNIKTVRELIHTIGFVQLNNLLVALTVCAIVXQALGKFCIFCVKDXLIRDLMVVGPRSKKPGFFLWPFKLKAPIGWFEQ

SEQ ID NO: 109116 - protein, 172 aa, Gossypium hirsutum
  Clone ID: LIB3829-036-Q1-K6-A6.pep
YQPYLISPEKGLRSLIKGVLELAKEPARLCVDEVHRVLIDIVSAAANATPGLGRYPPFKREVVAIASAALDGFKIEAKKMVVALVDMERAFVPPQHFIRLVQRRMERQRREEELKNRSSKKGHEAEQGMLNRAPSPQPGGQQTGGTLKSLKEKFGQGEKEVQEGSALKVAGA

SEQ ID NO: 109117 - protein, 174 aa, Gossypium hirsutum
  Clone ID: LIB3829-036-Q1-K6-A7.pep
ETLPEWRDKFLCYKPLKKLLKNIPSTPSLDPHHQRPVFADATNTAVTPVGHDHQHPPLDLQDWFVRILNEELEKFNDFYVDKEEEFVIRFQELKERIEQIKESSGKGGVFASESEFSEEMMDIRKDLVTIHGEMVLLKNYSALNFAGIVKILKKYDKRTGGLLRLQFTQLVLHQ

SEQ ID NO: 109118 - protein, 130 aa, Gossypium hirsutum
  unsure (1)..(130): unsure at all Xaa locations
  Clone ID: LIB3829-036-Q1-K6-B3.pep
WLGXGXSFXVXPCLGGVWVSLGVCLLCFPXFFXLXXXSFGFFXLFSSPSXXFFPLSGXFXXFPXXCXSPXFCVXLVSFVFFCFSSRLLRGLXWCXXRSSSXXLVPRXSAPPPSXFXRXPLGVLXVVGXFR

SEQ ID NO: 109119 - protein, 94 aa, Gossypium hirsutum
  Clone ID: LIB3829-036-Q1-K6-B6.pep
LSQANSLNSFSKQSSPRLERNSQRLPSFLHGISRLVLLIMATTHSAASDSVDVPGSVFTAERVVNSLPRHDVVKLDEGSFLQWKQQVRFIVNGY

SEQ ID NO: 109120 - protein, 75 aa, Gossypium hirsutum
  Clone ID: LIB3829-036-Q1-K6-E9.pep
GDRDVYLVPRSRWAHFVFRSMSRPPESSVVGHITSPRPSILNMFHPTGLLVEEAKENFILVRRCRTRKSQTPTSL

SEQ ID NO: 109121 - protein, 58 aa, Gossypium hirsutum
  Clone ID: LIB3829-036-Q1-K6-F1.pep
VQILKSLQLEGLYLNTTQPEQNCSQAVKRIRKVVVNNSWITWHACYLSPLDFFLKHLD

SEQ ID NO: 109122 - protein, 108 aa, Gossypium hirsutum
  Clone ID: LIB3829-036-Q1-K6-G3.pep
LWVWACWASEDNCSLEADDLGYTGIRLVSHLAHIPSSAGHLKDVLLLMSETHRLQRQGVIRASVTLDHSVGETNSVAPLFEINLPVPLEMRREDFALPSATPVKLEQL

SEQ ID NO: 109123 - protein, 174 aa, Gossypium hirsutum
  Clone ID: LIB3829-036-Q1-K6-G6.pep
DNELASCNCDDEGLWSVHSILECQKVSDFFIAVAYFSIPIELLYFISCSNVPFKWVLVQFIAFIVLCGLTHLLNGWTYYGPHSFQLMLSLTIAKLLTALVSCATAITLLTLIPLLLKVKVREIFLRQNVLELDQEVDMMKRKKEAGSHVRMLTQEIRKSLDKHTILYTTLVELS

SEQ ID NO: 109124 - protein, 80 aa, Gossypium hirsutum
  Clone ID: LIB3829-036-Q1-K6-G8.pep
YDRRICFKSRDFTINDDLLVLSRVSPLHQMIEGGSASLIFSLQRSKKSSRWPEDQALKNLLEAIFDRSPSSATYLHPRHS

SEQ ID NO: 109125 - protein, 88 aa, Gossypium hirsutum
  unsure (1)..(88): unsure at all Xaa locations
  Clone ID: LIB3829-036-Q1-K6-G9.pep
RRGYSTAPSAVETDRSGRPGAMXGKVERRHANKDSMSLETMAYSSNXAPDPATGTYRTENWGADINADDLRXMVVNHKIRLQPKLATA

SEQ ID NO: 109126 - protein, 101 aa, Gossypium hirsutum
  unsure (1)..(101): unsure at all Xaa locations
  Clone ID: LIB3829-036-Q1-K6-H1.pep
NRQSNKEKWFKIKKKKKKKKKKKKKKKKKKKKKKKKKKKKKKKKKKKKKKKKKKKKKKKKKKKKKKKKXGGPFKKKKFFPPGEENFFFFFGAPKKKSGGAF

SEQ ID NO: 109127 - protein, 135 aa, Gossypium hirsutum
  unsure (1)..(135): unsure at all Xaa locations
  Clone ID: LIB3829-036-Q1-K6-H11.pep
MAVAVHRQRWDWDNPADPNLIGLDAHSACCSWSNKEQAGTARPYQHMLNLNGDWHSPCTXTSSAVGVALTRTVTVAIAIALAPFAFFLFFFFMATFFGCPGLALNLRLRLRFRSRALLHLNQLKLDYGERSGTGP

SEQ ID NO: 109128 - protein, 174 aa, Gossypium hirsutum
  Clone ID: LIB3829-036-Q1-K6-H8.pep
KDSRRQAIKEEEARSEAEKRKNAYQAAFAKADEASKSLRLEQTLTVKPEEDENQVFADDEEDLYKSLEKARRLALKKQEEKSGPQAIALLATTSASNQTTDDHTSTGEAQENKVVITEMEEFVWGLQLDEEAHKPDSEDVFMDEDEVPGASEQDRKNGENEVGGWTEVIDTSAD

SEQ ID NO: 109129 - protein, 181 aa, Gossypium hirsutum
  unsure (1)..(181): unsure at all Xaa locations
  Clone ID: LIB3829-036-Q1-N6-A1.pep
LLHCALGGQWPLLRVGNRATGACVATSPDSDLQAFTHAPPHGTFEPLANQPSKTTKRPNQQTLFYXGELLLRRGHXTGKINLSQDXINPTHFSKKPENKPTLFEKCXKVVARAPFLRPKRLSKINARMPQETXPGEALVTPKSMYWDRINDLLATFLRTRVFLGNLIKRAFTLWNHTSIVN

SEQ ID NO: 109130 - protein, 68 aa, Gossypium hirsutum
  Clone ID: LIB3829-036-Q1-N6-B1.pep
SWSIYREPKVAVVIFLKELFFLNSFSCSWLAFSQRISCLCSVKVSRNPCLSETREAGKWSIVNQENVM

SEQ ID NO: 109131 - protein, 51 aa, Gossypium hirsutum
  Clone ID: LIB3829-036-Q1-N6-B5.pep
VLGHLRVACFPPYLKPQEMVRQLAVRFLLGVFATPEANFTMPASPNALSNT

SEQ ID NO: 109132 - protein, 67 aa, Gossypium hirsutum
  Clone ID: LIB3829-036-Q1-N6-F1.pep
SNYQFSFWFSSPLHFFIMFKYILVPVHFRFLKFSSAFISISFRIFLNTFPLLLFYSNLVHLLVSFEN

SEQ ID NO: 109133 - protein, 144 aa, Gossypium hirsutum
  unsure (1)..(144): unsure at all Xaa locations
  Clone ID: LIB3829-036-Q1-N6-G1.pep
LQPFSVFFLKPGGFVAPLKFPGVVYAPWVRPGSPASLSEGSAPPAHFFFLNPGVVCFWDPAQKKRWLGEEERFGGLGFFSFFRAFWCLQNFFPCLFLAHPLFFFPPLFFFYFPFGAFFPLVLFCPFFCPPFLPLSPXXXXFXPH

SEQ ID NO: 109134 - protein, 111 aa, Gossypium hirsutum
  Clone ID: LIB3829-036-Q1-N6-G3.pep
VLLFICELFINFLKPLTLLSFLPIMERGMPVNFTPCSHNAVYPQWLQTRQLSCFYTAEKDADKHKRDKNTRKLEPRFKSNNNYRKSIQCSHLLTFQPAYIRKTKAANRSCC

SEQ ID NO: 109135 - protein, 129 aa, Gossypium hirsutum
  Clone ID: LIB3829-036-Q1-N6-H2.pep
KVESKCAVWCLEPNLFSGGCSIRGMLSTGFAQFIFSINFKWKRFFPTQVWPHCRKLLALKHEWFPCFPPGCAGFFSICNCNTGSPCSGDCCLAVVLPVSNSGTPYLFSGPFHSVEKSVALIYHEMGYGP

SEQ ID NO: 109136 - protein, 161 aa, Gossypium hirsutum
  unsure (1)..(161): unsure at all Xaa locations
  Clone ID: LIB3825-023-Q6-K6-A10.pep
SQITAVDGQYQIGIYALRAIRYGEEITFDYNSVTESKEEYEASVCLCGSQVCRGSYLNLTGEGAFQKVLKEWHGILDRQQLMLEACELNSVSEEDYLELGRAGLGSCLLGGLPDWLVAYSARVVRFINFERTKLPVQILQHNLXEKHEFCIDISXDAERND

SEQ ID NO: 109137 - protein, 147 aa, Gossypium hirsutum
  Clone ID: LIB3825-023-Q6-K6-A11.pep
MEFGMILILFVASIPTILAEDISYGTIVVDGTTSIAQTDDNFVCATIDWWPHDKCDYKQCPWHYTSTITLDLSHPILTKAIQAFNRLRIRIGGSLQDQVLYNVGNLKSPCHPFRKMKHGLFGFSKGCLQMKRWDELNHFFNATSVML

SEQ ID NO: 109138 - protein, 203 aa, Gossypium hirsutum
  Clone ID: LIB3825-023-Q6-K6-B7.pep
PPAAPSLKRKLTLYRAFSGLTQTHHHHNPTSPSSSPDDIESQPILVNSVSRDGSQSYETTFLMSSEEGGEYELVYFRRLDDEFNKVDKFYRAKAQEVMKEADVLNKQMDALIAFRIKVENPPGIHFDRSVEMTRLASDIAASAAALSASTPSGAKSASKRAAHLEAIEESTHGQADDDDNGDEKERNTPTLEAKPAKPKPKVI

SEQ ID NO: 109139 - protein, 194 aa, Gossypium hirsutum
  Clone ID: LIB3825-023-Q6-K6-C12.pep
RVGQDQGSSSIVNASVASPAAQNMTFTYADNINSSASLLVKRENPGGPVSPLTGLNKRARLNATGSDSILQQQISSHMDGLHGPDMSWKNMLLPQQATARGIQYANASMQKYPLQAFEGVLNQEVGTMPFAAGQSAVRYGAKEEPFDPDKLDSAELNRETDTNHLDPQQRRLQPRLPHGLVRPGFLETPWNGIN

SEQ ID NO: 109140 - protein, 88 aa, Gossypium hirsutum
  Clone ID: LIB3825-023-Q6-K6-E8.pep
HKPIMAKFSSVAIHPPLKWRLIMPNGRIQHSFTELTFLHVKKHVSLALNINLGAWNTHLASNTLLLAHAYTLADIIMTFNFYSGFLHI

SEQ ID NO: 109141 - protein, 122 aa, Gossypium hirsutum
  unsure (1)..(122): unsure at all Xaa locations
  Clone ID: LIB3825-023-Q6-K6-F10.pep
SIYCIKFNYLVLRVIRYKHDILDIFLFLSVVLVSLLYLNLSRCNLSDDGCEKLSSKFHIYPFHVCRVKKVLRWPLAYGYFLLTELGNLKRLNLXFNDISDACLIHLKSLTXLESLNLDSCRI

SEQ ID NO: 109142 - protein, 42 aa, Gossypium hirsutum
  unsure (1)..(42): unsure at all Xaa locations
  Clone ID: LIB3825-023-Q6-K6-F7.pep
FFFLLFFFFFFFFFFFFFFFFFFFVATFCCLSLFLXLNKQKI

SEQ ID NO: 109143 - protein, 53 aa, Gossypium hirsutum
  Clone ID: LIB3825-023-Q6-K6-G12.pep
PWWTHFRGGGCLITPLSFPSFIATLSEKSHATYLELPSIGIWEIYQQNSLNCF

SEQ ID NO: 109144 - protein, 95 aa, Gossypium hirsutum
  Clone ID: LIB3825-023-Q6-K6-H7.pep
PKLPFFHRKSTISLRLQRKPNEIRTPNLYFSQFYQQSSRFTHPVNQNPLFLIYQKSFSLPLLQTNTPQPLYLLLFHLTSIAAEATDEKSELVNTK

SEQ ID NO: 109145 - protein, 75 aa, Gossypium hirsutum
  Clone ID: LIB3825-023-Q6-K6-H8.pep
ATAKTIFNMIQQGSNSLVQVINLYSVVISQAMCIIQQNWHSNHFPATITVTVATTQNIKEEGVVNMINGIQQSNN

SEQ ID NO: 109146 - protein, 140 aa, Gossypium hirsutum
  Clone ID: LIB3825-023-Q6-K6-H9.pep
PVSVKSIIKSDNEWFFFCARGRKYPNGSQSRRATEQGYWKATGKERNVKAGSNVIGTKRTLVFHTGRAPKGERTEWIMHEYCMKGKSQDSLVVCRLRKNSEFRLNNNSRVARNHRELSIVHDSNHATSDGGTDLNCISEG

SEQ ID NO: 109147 - protein, 201 aa, Gossypium hirsutum
  Clone ID: LIB3825-024-Q6-K6-A8.pep
LCCCTDDSSDDEQAAAVNEVDFKVSSLISAFANCSFIQNLCWLLKFYRSNSSNTNQYIIGLLRKVTDDLELAPMLYQLSLLVTFYDILEEQKLSPSEDHADIVVFITSLVRKMLKKMKHQPLLFIEILFWKTRRECHYINAEYLLHELGHLKKGNRNQDSVPGNTEVESSEAANEWVRRSIADALGDDEADVVIAHDIRHQ

SEQ ID NO: 109148 - protein, 151 aa, Gossypium hirsutum
  Clone ID: LIB3825-024-Q6-K6-B10.pep
MANCPAVHGGYPSDYVAVSIAIFAVILLIVRSSFPFLIHKVPSARGSAFWIPVIQVVASFNFLLSLVMAGNFLKYKKSHWWLSCYVWAVWVEGPLGFGLLMSCRIAQAFQLYYAFVKRRLPPVRSHIFLPLIVLPWIAGAAIIHVKKPLNC

SEQ ID NO: 109149 - protein, 122 aa, Gossypium hirsutum
  Clone ID: LIB3825-024-Q6-K6-B8.pep
MAESVANPTVVGASTVEETSPDLLKNTPSNIARLEDVIEHCKGRRKYLAQTRSPSDGGDVRWYFYKVPLAENELAASIPRTEIVGKSDYFRFGMRDSLAIEASFLQREEELLSSWWKEYAEC

SEQ ID NO: 109150 - protein, 130 aa, Gossypium hirsutum
  unsure (1)..(130): unsure at all Xaa locations
  Clone ID: LIB3825-024-Q6-K6-D9.pep
VKFLDSXTLLSASTDNTLKSWDLKKTCSDGSTTNTCCLTFSGHKNEKNFVGLTVLDGYIACGSETNEVYCYYRSLPMPITSYKFGSVDPISGHQTGDENGQFVSSVCWRQKSNMLVAANSTGSIELLKLV

SEQ ID NO: 109151 - protein, 201 aa, Gossypium hirsutum
  unsure (1)..(201): unsure at all Xaa locations
  Clone ID: LIB3825-024-Q6-K6-H10.pep
INLVXDLMDVNQWSTLFSGIVSKASTLDVLSTGVAGNYNGALQVMTAEFQVLSPLVPTRESYYVRYCKQHAEGTWAVVDVSLDTIRPSPTVRCRRRPSGCLIQEMPNGYSKVTWVEHVEVDDGGVHNLYKQLVSSGHAFGARRWVSTLDRQCERLASLMASNIPTGDVGVITNQDGRKSMLKLAERMVISFCGGVSASTAH

SEQ ID NO: 109152 - protein, 105 aa, Gossypium hirsutum
  Clone ID: LIB3825-025-Q6-K6-B12.pep
LNNMLFQLVDKEKELLRCNFIFKIWHALDDVKVGPFFWLIYSCALGFVLTCPSCQLKREWKDFLNRKAFSLTNSVQIKAWFNRQWHRQLEQNHKNSDPIIRLSIY

SEQ ID NO: 109153 - protein, 161 aa, Gossypium hirsutum
  Clone ID: LIB3825-025-Q6-K6-B8.pep
MNPVHFQPAPPPPWFPMLPPEPPNSSTFWETRNVRDRLRELQDTLNLANAVQKELEILTMIKDGSMDPSVSEFLKYLEDRRIDLETQELLSLEAANALMSKLRAQLEPFRYVADEGIPWEEKSAVARLTNKIKKSKRNNLWRKRKRKRIAELLAKEHEQFD

SEQ ID NO: 109154 - protein, 69 aa, Gossypium hirsutum
  Clone ID: LIB3825-026-Q6-K6-A8.pep
MISGCLYMVMFTAQEFLRNPDRYIRLGARPPRGVLLVGLPGTGKTLLAKAVAGEAEVPFISCSASEFVE

SEQ ID NO: 109155 - protein, 193 aa, Gossypium hirsutum
  Clone ID: LIB3825-026-Q6-K6-B11.pep
KDNPLGCRQIASSGALETLSSLIASHFPSFCSYLPRINEMDETSSDIPLTDSELDFLVAVLGLLVNLVEKDEYNRSQLAAASVCLPNSKGSTEESRISVIPLLCAIFLANLGEEDAAGEVLSWNNEAALLQEEKEAEKMILEAYAALLLAFLSTESKRTRNAIADCLPNRSLSILVPVLERFVAFHFTLNMIS

SEQ ID NO: 109156 - protein, 204 aa, Gossypium hirsutum
  Clone ID: LIB3825-026-Q6-K6-B8.pep
RALLRLGALGLLLETARRAFAVDAMEPAEGILLIVESLTLEANESDNISISQSVLTVTSEETGTGDQAKKIVLMFLERLCHPSGQKKSNKQQRNTEMVARILPYLTYGEPAAMEALIQHFNPYLQDWGEFDRLQKQHQDNPKDESIAKQAAKQRFTVENFVLVSESLKTSSCGERLKDIILEKGITGVAVRHLGESFAIAGQAG

SEQ ID NO: 109157 - protein, 168 aa, Gossypium hirsutum
  unsure (1)..(168): unsure at all Xaa locations
  Clone ID: LIB3825-026-Q6-K6-G9.pep
SHDDKFIQVNIQLXTPIESTCFLTIKTQRNTTCYVLAFASELTEVFDCLYTYDSDYRLSPSLEDWKSAETLCTCLKPVCDANMFLTTTTLPTEITFFYEVCENTLWTWVTPSLARMLSSETLHLSMHXKIDQYWIDCKLVMALDEVMDPHSKWKLDEFRPTKLCGEYA

SEQ ID NO: 109158 - protein, 134 aa, Gossypium hirsutum
  unsure (1)..(134): unsure at all Xaa locations
  Clone ID: LIB3825-027-Q6-K6-A11.pep
LVGFLXGSVSAPLVCSNSSGELVVNPSASVFSQQDHLLTSWLLSTIGSSFLSSFTDVRTACDVWSTANSLFATDTGAKQSRIRHELHSLKKGSLSITGYVAKSKGWCALLAVSGSHISEAEETEIMGLPSLSSL

SEQ ID NO: 109159 - protein, 75 aa, Gossypium hirsutum
  Clone ID: LIB3825-027-Q6-K6-A2.pep
ARGLSYVRKRACRAERPQLSFNGMLPSFLVIRCGPYGLANKIYYSYSLTKVARLLAAGIYNAITQTRSSYLINML

SEQ ID NO: 109160 - protein, 129 aa, Gossypium hirsutum
  unsure (1)..(129): unsure at all Xaa locations
  Clone ID: LIB3825-027-Q6-K6-A5.pep
TASNRCWRGLLPFKLLNHGKVFVKHQKKANFQHADLLYIQYLPYSTGLSLLWFDMKDFYVRVITXQGDDSTPEILTLNDILLYPNTLLENNGIIIPIYSDGAYLLLIRDRVDNRSQETTFVSTDHGRLT

SEQ ID NO: 109161 - protein, 102 aa, Gossypium hirsutum
  Clone ID: LIB3825-027-Q6-K6-A7.pep
YNPIAQLQAHLQNNLTQIPLAQMAQNLNKLQPTKNPSLTPAPQLASSSLQHLHTLYAVHLHAKRHVPPCQLASVPSWMHRPGPRLLRRNRSLRRGLSGENEP

SEQ ID NO: 109162 - protein, 181 aa, Gossypium hirsutum
  Clone ID: LIB3825-027-Q6-K6-B10.pep
NFVGSETRVQNALITMYGRCGHTKSARSVFDFCSSRNLCSWNCMISAFSQNKEGRRALELFHFLEFEPNEITIVALLSACHQLGLLRQGKQIHGHVLRIGIFENSFISAALVDMYSNCGQLDLGWQIFTRSKDKSIAVWNSMISAYGYHGDGQMAIQLFHKMCDSGVRPSKSSFVSLLSAC

SEQ ID NO: 109163 - protein, 118 aa, Gossypium hirsutum
  Clone ID: LIB3825-027-Q6-K6-B2.pep
ALLYVIRSIILRCFPLPWFYLLILYWYHRHKYLLYTPSHIFLVYLLFHAPHLASPSALLYAFMACPITHHHQSLLVTHQCSGYNIPPGSVAEDVTYSLIFFPQLFGGSTWLGSVFSQR

SEQ ID NO: 109164 - protein, 191 aa, Gossypium hirsutum
  unsure (1)..(191): unsure at all Xaa locations
  Clone ID: LIB3825-027-Q6-K6-B6.pep
IDSYTQLGLPXLQLGVIPGFGGTQRLPRLVGLTKSLXMMLTSKPVKGEEALGLGLVNAVVSSHELIETARWWALDILARRKPWVATLYKTEKLEPLGEAREIFNFARAQARKRAPNLKHPLVCIDVIEEGIVAGPRAGLWKEAEAFQVLLKSDTCKSLVHIFFAMRGTSKVPGITDRGLMPXQVRXSCCTW

SEQ ID NO: 109165 - protein, 89 aa, Gossypium hirsutum
  unsure (1)..(89): unsure at all Xaa locations
  Clone ID: LIB3825-027-Q6-K6-C6.pep
GRVGSSALLLVAXKKKKKKKKKKEEQKKKKKKNTRKQTTKDIFYGGTYFEFTGPRHTTPCVGPTLGAPQVHSLGHLLLLPAGGIPREGP

SEQ ID NO: 109166 - protein, 95 aa, Gossypium hirsutum
  unsure (1)..(95): unsure at all Xaa locations
  Clone ID: LIB3825-027-Q6-K6-D10.pep
LLKHLLPLTEPLTVGLQMVLQTSQQAXHPVAHAMEPWLQSLAQTLADGSPYGPSCASGSASDYVGHYVVDMGKLITILGTLLGALNQPEHTLQQT

SEQ ID NO: 109167 - protein, 198 aa, Gossypium hirsutum
  Clone ID: LIB3825-027-Q6-K6-F4.pep
ISSLFSHFLAVCSTTWSPSKLCYRENGMSHEGRSNSGYTWGFYFQGVKLSLSSLRAAMRIFSGIFKEVMAPKLLTLLDLYEFYANFASAWLQKNSEGLVLMMQPLIVTYTSGHMPYEVDMMALKETLNQVPDTVTDVLIDGLEVDKCAEEKQVGELLNLIPEDERWHIIGAFVWQHMSRFMKHKLNSLAISDDSFLSG

SEQ ID NO: 109168 - protein, 182 aa, Gossypium hirsutum
  unsure (1)..(182): unsure at all Xaa locations
  Clone ID: LIB3825-027-Q6-K6-G11.pep
GRVGAFAQVPDLNIWYGPDSYXGANIXRLFQQRLCVREEMXNHPKHNRDSIKSLLPRLHYYENGTCIVHHLFGHEVVERINEMYCDAFLTAHFEVPGEMFSLAMEAKRRGMGVVGSTQNILDFIKQRVQEALDRNVDDHLQFVLGTESGMVTSIVAAVRSLLDSSNSTSSTKINVEIVFPVS

SEQ ID NO: 109169 - protein, 200 aa, Gossypium hirsutum
  Clone ID: LIB3825-027-Q6-K6-H1.pep
RECRSWLGLDSDSSPYRNTSIVEFVLENSKDDDDRDLPGLCKLLEAWLMEVVFPRFRDTKDIQFKLGDYYDDPTVLRYLERLEGAGGSPLAAAAAIVRIGAEATAVLDHVKASAIQALQKVFPLRRSEETARHQLDGEMNNFLPVESEETLGKPDQEDSAILAEVPGISSLEGMYEEETISDKIKDASVKIMSAGVVIGV

SEQ ID NO: 109170 - protein, 123 aa, Gossypium hirsutum
  Clone ID: LIB3825-027-Q6-K6-H7.pep
KEKRRAGREKKRKKGKGGGPRPRQRERGPWGEPPPPPRLKRPPRGRPTGPPGWAKGGKGEKGRAPKRINRGGKKGCPAKRKKRGAPRVFPKRTPKKNGHGKGIRGQKRKTKTAPPRGRKTWNP

SEQ ID NO: 109171 - protein, 84 aa, Gossypium hirsutum
  Clone ID: LIB3825-027-Q6-N6-A11.pep
CARTSDVLYDLRVSLTKLETKYDHLYRFSPLSFSFLGLTPDFVLLDLEFVVTKPLFRLGPISGCYKVLGNATLNIFRLHVILQG

SEQ ID NO: 109172 - protein, 35 aa, Gossypium hirsutum
  Clone ID: LIB3825-027-Q6-N6-A2.pep
RIWVYGFKGPVCCLYRSVIGPYFLLVYNRNYTFLV

SEQ ID NO: 109173 - protein, 82 aa, Gossypium hirsutum
  Clone ID: LIB3825-027-Q6-N6-A5.pep
WFVLPRTLKLRKGLFSPCSYRSQGLVDPKLPPLVTRGPPDRFVEFPASFNSLLDGSTGLARLCLGSTCQAEDCFPDKPVFRQ

SEQ ID NO: 109174 - protein, 99 aa, Gossypium hirsutum
  Clone ID: LIB3825-027-Q6-N6-B10.pep
EFLKQIPGEAGVGVWGALLSACNYHGNMEMGREVAEHLFGLEPENVVGYYISLANLYVSVGGWKDAMEFRQKIQHKNLKKLPAYSINIDAASSSASAWK

SEQ ID NO: 109175 - protein, 87 aa, Gossypium hirsutum
  unsure (1)..(87): unsure at all Xaa locations
  Clone ID: LIB3825-027-Q6-N6-B2.pep
SKWSAIRSQFALAIHERSYAWQTAPXIFQFKDSGVNCEPVVSSSRFKVYKVGLGLGXAVRVTSGSSNRFDGMVFLKQGNIGVWSINV

SEQ ID NO: 109176 - protein, 148 aa, Gossypium hirsutum
  Clone ID: LIB3825-027-Q6-N6-B8.pep
ISQRKHKYHPPMQRIPSADSSSESSSIFSGSDASSCSTTSTKDSSRSEDFSDYLFGETGPEWYNQNGISSETAASSSYHGFDTDSGAEMDGHARSLTFLYTDSIRQHWNSNGRASDFEQGGWSNPYDVRSSGISYRRASVDGSTQTFY

SEQ ID NO: 109177 - protein, 162 aa, Gossypium hirsutum
  Clone ID: LIB3825-027-Q6-N6-C6.pep
INTSSSLAWGSPRFTGPCTRAGHHPPEGGPRERGGGTGAEPAGGKRGPADTGAKKTRRKNKKERGGGRMREHTHNKRGERTAPRAEKRPPAPPERKKHPPRGERRNADRAPGGGFCPPDGGQPTGNPPPPGAQRGAAGRARGGGPPGENPAGGRRTAAKKTS

SEQ ID NO: 109178 - protein, 73 aa, Gossypium hirsutum
  Clone ID: LIB3825-027-Q6-N6-D10.pep
DQTPKKELFSSCFLIYKLKSVSYVYIFISFPYLPFLILKSKPSNYGAKVLQQKQSAFQHARICSVHTKKIYPQ

SEQ ID NO: 109179 - protein, 62 aa, Gossypium hirsutum
  Clone ID: LIB3825-027-Q6-N6-F2.pep
NQVDEVFIDLISLPQLLIMPPCLASPPLGAPIINVGQSRDRVIIFSFLFLGFIAPPLGANVL

SEQ ID NO: 109180 - protein, 61 aa, Gossypium hirsutum
  Clone ID: LIB3825-027-Q6-N6-F4.pep
GSNCGFTVQFLFLYIFFKFSGWRSVVDGPLCFLYVVPIWVFSGSVLFGTLDRFWCDFAVYI

SEQ ID NO: 109181 - protein, 71 aa, Gossypium hirsutum
  Clone ID: LIB3825-027-Q6-N6-F7.pep
ISKLLELENYSNFKTSNDSTQNNPTRLIDWSNHNTDHPLFMVGRIPNTVYNDSNTLPMNLETESQKHFPPS

SEQ ID NO: 109182 - protein, 133 aa, Gossypium hirsutum
  Clone ID: LIB3825-027-Q6-N6-H1.pep
QELPRMDARIAEGIVRKWQNIKSEAFGPDHRLDKLPEVLDGQMLKTWTDRAAEIAQLGWVYEYSLLNMAIDSVTLSLDGQRAVVEATLEESTCLTDVHHPENNASNVNSYTTRYEMSCSNSGWKITEGSVYKS

SEQ ID NO: 109183 - protein, 114 aa, Gossypium hirsutum
  Clone ID: LIB3825-028-Q6-K6-A5.pep
IISVLMCLLNKVAHQRGSGEYVRFPPAGDGGTEEQQDGYSHQIQSQQNQPMMMQQHGNRAQATQLSGLTHGVSGQRASAYGANLAGMAPSSFGYSGSASAASPSPSASPSGSGS

SEQ ID NO: 109184 - protein, 108 aa, Gossypium hirsutum
  Clone ID: LIB3825-028-Q6-K6-A9.pep
RMEQVDEPVKDEREQHVLAIGFRIMPGVSPVASISQSQHQPFPTPSPFSFSVASTRWSSRPLIHRHSNLFLRFSVLLFSFISALTLVTPSTNNKHHPSPSFTDYSELM

SEQ ID NO: 109185 - protein, 75 aa, Gossypium hirsutum
  Clone ID: LIB3825-028-Q6-K6-B11.pep
YKFLSILDIKNQIFHLRISLCPCKRFYNFNVLLSFFLKNITISFIGFYLLFFLLSSFMPSSTYYYFLNNNRLEIY

SEQ ID NO: 109186 - protein, 186 aa, Gossypium hirsutum
  unsure (1)..(186): unsure at all Xaa locations
  Clone ID: LIB3825-028-Q6-K6-B7.pep
WNMAINLFVADTGAKQSRIRHELHSLKKGNLSIKAYVAKIKDLCAMLDASGSRLSDEEKIEVMLAGLPSEFEAVISSARLSTGVLSLQRVVDALVDCESRQAQVLQEVSLNANLVEDAPSVEGGNRGGRTSVRGRGRTFRSRIQCQICSRXGHAAQKCYYRYHRESNNQGDPSGVERAALDLCART

SEQ ID NO: 109187 - protein, 198 aa, Gossypium hirsutum
  unsure (1)..(198): unsure at all Xaa locations
  Clone ID: LIB3825-028-Q6-K6-B9.pep
LGKXILVTGGAGFIGSHTVLELLLGGYNAVVVDNLNNSSDVAITRVKELAGQYGNNLYFHQVDLRDKPALQNVFTERKIDAVIHFAGLKAVGESMKKPLMYYSNNIVGAITLLEVMEAYGCKNLVFSSSAAVYGWPKEVPCREEFPVSAINPYGRTKPIIEEICRDIQHADPEWKFILLRYFNPVGAHQSGYIGEHPR

SEQ ID NO: 109188 - protein, 68 aa, Gossypium hirsutum
  unsure (1)..(68): unsure at all Xaa locations
  Clone ID: LIB3825-028-Q6-K6-D6.pep
PSVRLVSAWKQXTNSHSPVGILHAVQRDGAVSVGFLGLETLWVGKAYQLQMAEPYYVGQFVRLKPNVV

SEQ ID NO: 109189 - protein, 69 aa, Gossypium hirsutum
  unsure (1)..(69): unsure at all Xaa locations
  Clone ID: LIB3825-028-Q6-K6-E1.pep
XIQSVSRXRFFLSPGLAPTFQIYMASMFENQYKLLAXXPXNKVQEVIVETTLDKEEIKSTIQSCTNRVV

SEQ ID NO: 109190 - protein, 84 aa, Gossypium hirsutum
  Clone ID: LIB3825-028-Q6-K6-E12.pep
MESDSIDCMASSDVMDDDEIHHHQLSSSLPKTHSNNGNSNNSTLSSAVHASTTSVHELLECPCCTNSMYPSIHQCHNGHTLCST

SEQ ID NO: 109191 - protein, 52 aa, Gossypium hirsutum
  Clone ID: LIB3825-028-Q6-K6-E7.pep
LASVAYLDNHNLKSKAKVDLRGGEIWILNPLEILFEKVFLKLIYEGINFVIK

SEQ ID NO: 109192 - protein, 61 aa, Gossypium hirsutum
  Clone ID: LIB3825-028-Q6-K6-F3.pep
YNALGCFGYIKYTCTILLREILYLIYDNANKVRIKKPCFMFFFIGQSRNINLLKNMVNNSF

SEQ ID NO: 109193 - protein, 57 aa, Gossypium hirsutum
  Clone ID: LIB3825-028-Q6-K6-F4.pep
FYLFIYYLNVGKLADCIPKVSKRICSYSHGNGVSTSPCFCLWSGKVIPFLASSPTPL

SEQ ID NO: 109194 - protein, 156 aa, Gossypium hirsutum
  Clone ID: LIB3825-028-Q6-K6-H1.pep
MIMDKNWKFIRLKQGFGVGVLLFLLCQTLVCWSLNEEGLALLRLKDRVVNDPFCSLSSWKEEDGELDHCSWFGVECSDGKVVVLNLKDLCLEGTLAPELGSLAHIKSIILRNNSFTGIIPQGIGGLDELEVLDLGYNNFSAPIPPELGNNLSLTIL

SEQ ID NO: 109195 - protein, 173 aa, Gossypium hirsutum
  Clone ID: LIB3825-028-Q6-K6-H11.pep
MDARVLDGIINRLLEVRGKPGKLVQLSESEIRQLCLVSKDIFSRQPVLLELEAPIKICGDIHGQYSDLLRLFEIGGFPPHVNYLFLGDYVDRGKQSLETICLLLAYKVKYPEKVFLLRGNHECASVNRIYGFYDECKRRFNVRLWKVFTDCFNCLPVAALVDEKIFCMHGGLS

SEQ ID NO: 109196 - protein, 162 aa, Gossypium hirsutum
  Clone ID: LIB3825-028-Q6-K6-H2.pep
MEDFSKYAHSPAHLAVARRDHAGLRRIFSTLPRLAKAGEVNTEAESLEAELQADAVSAVIDRRDVPGRETPLHLAVRFRDPISAEILMAAGADWSLQNEHGWSALQEAVCTREEAIAMIIARHYQPLAWAKWCRRLPRIVASTSRIRDFYMEITFHFESSVI

SEQ ID NO: 109197 - protein, 124 aa, Gossypium hirsutum
  Clone ID: LIB3825-028-Q6-K6-H8.pep
AIPYLFTFKNTSRVIYFQKQYPPLSKLQQIHHPISRLHNGELKLPGKWLVIFNIYIEDWEKFPILSLSFSYKVTWPALLSRFSFSCYHGQRENHSFSRNKCIGTELGPGPIAFEYMMLVLKESP

SEQ ID NO: 109198 - protein, 73 aa, Gossypium hirsutum
  Clone ID: LIB3825-028-Q6-K6-H9.pep
AHWSLKPPSAYGLRLCCTKYPSLTFSPVFVNHPFHFLWDLLYQIHQSVVSTSFRCQHVHCFIGLLRFDFIDYC

SEQ ID NO: 109199 - protein, 143 aa, Gossypium hirsutum
  unsure (1)..(143): unsure at all Xaa locations
  Clone ID: LIB3825-028-Q6-N6-A11.pep
GGNPHQIKTPKPQKQSTNRGGAQNKKKGLANRGGKRKKPNPERFNSKKTPPKKKPKDLTTHNLPLGLFRGQYSSGGGQPFGPKPVXGKNPGNPTPEPLNPPPKGRTGPPPPGQPFGKVTPHFTKTGNINGPKPSKGTRPWADQ

SEQ ID NO: 109200 - protein, 106 aa, Gossypium hirsutum
  Clone ID: LIB3825-028-Q6-N6-A5.pep
RDYWQYSQLLQNSGDLHGQQATSLVDQMIQYSQFANIQQPMVSSSFPSLPASFAASGSSSSSSSASFPLLFAEHQQMSIFRQPSDRTPASESDFPVPPWSCPSSSG

SEQ ID NO: 109201 - protein, 96 aa, Gossypium hirsutum
  Clone ID: LIB3825-028-Q6-N6-B2.pep
NSEHIHGWDKKPVRFQLWTSDGQHARSQFTLNEPGKWFHYHIGDFNVENSNSSTKIKLSMTQIDCTHTKGGLCLDSVVIYPSKYREKLKQKGFLRC

SEQ ID NO: 109202 - protein, 83 aa, Gossypium hirsutum
  Clone ID: LIB3825-028-Q6-N6-B7.pep
FWILSIMASADFVTGESSSAVFSGDRVTTGLPRHEVVKLDEGTYIQWRKQIKLIVDGYGLTGFLDGTVVPPSRFMPLPEVRVL

SEQ ID NO: 109203 - protein, 75 aa, Gossypium hirsutum
  Clone ID: LIB3825-028-Q6-N6-B9.pep
NHWGDDGPYPLIHLHMDSTLYLGLQCNSRSAFNTRSIEYFSIPGSPGRSNKRTCLPHAFVNAATIFKTDVTLPLP

SEQ ID NO: 109204 - protein, 124 aa, Gossypium hirsutum
  Clone ID: LIB3825-028-Q6-N6-C12.pep
MAPCQWGLVEGGWLFGPPFCPVLVFPPPPLGWGGPPGPRPIWGGGGGLSPAPPLFFFPPPGPPRLGFSPSPKKKQKMEWGRKKKKKKNLLKKKKKKKKKKKKQKKKKKKKKKKNKKKNKKKKKK

SEQ ID NO: 109205 - protein, 121 aa, Gossypium hirsutum
  Clone ID: LIB3825-028-Q6-N6-C3.pep
GFNNLGPNVPLFFFQPWGGWFFFFRPFFCGEKSFETPLGSGIFFLGVPWGFPPPLVLKQGAGVFSPLGPGIPCLVGVFWPCFCPPFWFMGFFFWFFFFVKLVFLMVLWGPPFFFWGLFGFF

SEQ ID NO: 109206 - protein, 105 aa, Gossypium hirsutum
  Clone ID: LIB3825-028-Q6-N6-D12.pep
WVAPGQVAAPGNANPGYPTPSRNSSMWGGAGAEPNHNGDKFSDQRDRSSQGNESGFGGTKPWNRQSSFGSGGGGSSRPPFKGQRVCKFHENGHCKKGASCDYMHT

SEQ ID NO: 109207 - protein, 185 aa, Gossypium hirsutum
  unsure (1)..(185): unsure at all Xaa locations
  Clone ID: LIB3825-028-Q6-N6-E7.pep
NMNEIDKTLPQLLSMLRTAEGNMKKVGPKPILMVYNNKGKGKAKVQTKPKGKGRSKPGKVKAALKPKGGVAKEGNCFHCGVTGHWKWNCPIYLEEVKKAKISXRLLQGLQRSRTLARGDVDLRVGSGAKVATLAVGTYNLSLPSGLGLCLEDCYYVPSLTKNIISISCLDKIGFEIIIKNKCCSF

SEQ ID NO: 109208 - protein, 112 aa, Gossypium hirsutum
  Clone ID: LIB3825-028-Q6-N6-F10.pep
WGSPPFSGPPGIPRFFLGPSPPFFPPGGGGFFLGGEIPGVCQVYPQMGGEVVPPSLWRRVYPPQGWAPTPGGRFSFLAPGLFFKRESPPFGRLCGFKVSSPVGAFGGVYFTF

SEQ ID NO: 109209 - protein, 69 aa, Gossypium hirsutum
  Clone ID: LIB3825-028-Q6-N6-F12.pep
GPGGPPGESGPGPGGGPTFPLGGGFKGGGKKGQKGFPGENGFPPKIPKKKQPGKKKGKPGGPKGGANPK

SEQ ID NO: 109210 - protein, 78 aa, Gossypium hirsutum
  Clone ID: LIB3825-028-Q6-N6-F3.pep
HQAVALRIQLGDRWTQMEERIEIHILMPNAAAMPRHRTNELGLGILKIWMPKSALLGFRTRLNPILEMNNKPEGPAEA

SEQ ID NO: 109211 - protein, 65 aa, Gossypium hirsutum
  Clone ID: LIB3825-028-Q6-N6-F9.pep
DVAKAVNGLLTPTNSVLMITHYRRLLEVIKPTFIHIMENGRIIKTGDSSLAEVLEEKGYNAISAA

SEQ ID NO: 109212 - protein, 66 aa, Gossypium hirsutum
  Clone ID: LIB3825-028-Q6-N6-G12.pep
SLLVIVLVLARFYLFYYRFGKFLFIDLFVPPYAPKRTKNSLFFFPYLCCKNCSGCFVKAFYPETKL

SEQ ID NO: 109213 - protein, 122 aa, Gossypium hirsutum
  Clone ID: LIB3825-028-Q6-N6-G7.pep
VDKAQGNLISAEWSSEHELQLIQQQDRALEYIANQGHGHGHGLGCLIYPHKHNRTVLSIVVCSSIAKRATFSSSTLIAEPPPQVTAVVVVIGYKLRVNSAERLMKKRIEIAVEDENGEGLNE

SEQ ID NO: 109214 - protein, 96 aa, Gossypium hirsutum
  unsure (1)..(96): unsure at all Xaa locations
  Clone ID: LIB3825-028-Q6-N6-H1.pep
VDDNGSLYDWASDYLRRDQPLMQMVDPTLSSFDADQVEKIGEVIXSCVHPEPQQRPDMREVGARLREITAITPEGAIPKVSPLWWAELEIMSTEAS

SEQ ID NO: 109215 - protein, 71 aa, Gossypium hirsutum
  Clone ID: LIB3825-028-Q6-N6-H11.pep
SAPNYCGEFDNAAAMMSVDESLTCSFQIIKAADKKPKFGFGTLASTKSSITPTRIKEQWPEQEEEEGCHLM

SEQ ID NO: 109216 - protein, 172 aa, Gossypium hirsutum
  Clone ID: LIB3825-028-Q6-N6-H2.pep
RQERSEMVGNWKAKVYDMLHVTVSVKSRSVPGAMTDEELFSVDDEERMAKGGDNDEYDDVLTAEERMQLDSALCLGNSDGLCDDDEHGVIECKENGSGASYENCESNGVAKDKKGWFGWNKKGSKNSDDPEDSKILKKFSKLAPEGSNQRHADSHKSSSEISKEDAVDGKKS

SEQ ID NO: 109217 - protein, 157 aa, Gossypium hirsutum
  Clone ID: LIB3825-028-Q6-N6-H8.pep
KIIGKKETVYMPEGNENMGQWGGGGEPGRGREKAAGPKEGTNSREGGEAESEGGRRETKRKSGREKTKTRPAKRQRPKPGPRGRPGDPGTQPEGAAGKPMGREIKNRGGNGQRPKPGEKGGEGTTTDGTKSGSQKGKTQAPQRKGLTPQKREGKTGK

SEQ ID NO: 109218 - protein, 45 aa, Gossypium hirsutum
  Clone ID: LIB3825-028-Q6-N6-H9.pep
GIRISFLAYVYPQAFVCSYIRNCPIIYQKSSLSFATMINVNNLGK

SEQ ID NO: 109219 - protein, 43 aa, Gossypium hirsutum
  Clone ID: LIB3825-029-Q6-K6-A8.pep
RWLFFSHARLLYFWFLYFCFFFFFFFFFFFFFFFFFFFLKVML

SEQ ID NO: 109220 - protein, 106 aa, Gossypium hirsutum
  Clone ID: LIB3825-029-Q6-K6-B10.pep
VLQEAINVAAKDWGLQCLRYEIRDISPPRGVRAVMEMQAEAERKKRAQVLESEGERQSNINIADGRKSAVILASEAARMDQVNRAQGEAEAILARAQATAKGIALV

SEQ ID NO: 109221 - protein, 51 aa, Gossypium hirsutum
  Clone ID: LIB3825-029-Q6-K6-B2.pep
MGQLIPCTIKRNQIRPNVNRVNIYYLKNVIYCLTELVVSKAVIILQTKSFV

SEQ ID NO: 109222 - protein, 101 aa, Gossypium hirsutum
  Clone ID: LIB3825-029-Q6-K6-F2.pep
WSLASPYSRTPLNYNSLGRLSTTSQMAKPWCYTNLIVLHTSPFLQLDAILIQRHITRSPIPTITHSVWIMGHPTVCLEEALQSVDGYFSQETDPLLQKTSA

SEQ ID NO: 109223 - protein, 70 aa, Gossypium hirsutum
  Clone ID: LIB3825-029-Q6-K6-G5.pep
AVRSQSGSVNILKGEQKLTRSLHDKKLDQGKREKNLHAEDPLQKQNAPAGSGGAATAGSTTFTGQHLLKS

SEQ ID NO: 109224 - protein, 188 aa, Gossypium hirsutum
  unsure (1)..(188): unsure at all Xaa locations
  Clone ID: LIB3825-029-Q6-K6-H4.pep
DLRSWXGWVESRLRQLTXXIERDTYGKLQCHPYAQDYVDASKPCAHCAFFMGLQXEXXEIVQEGQQFDIRGSVDEFRHSISMYMFWKPGMEIYVSHVRRKQLPAYVYPDGCKRSRNLHLTPQQPSYKISRNNGVAYQAESGEKCLKRKKDPDGENSEQSRLDKRRSPDRNQSVSPEIVSRKLGSACTG

SEQ ID NO: 109225 - protein, 116 aa, Gossypium hirsutum
  Clone ID: LIB3825-029-Q6-K6-H6.pep
KIWHLKNTALAGSTPSFLTCTTSLLIYITLYPEKVTLQITHQRKISIYTIRATLPLLDCTRYHTNSFTLIRLRVCGKIISQWENISLFICRLFTTSVIISNAVSDYPPIVNTKQIF

SEQ ID NO: 109226 - protein, 109 aa, Gossypium hirsutum
  Clone ID: LIB3825-029-Q6-N6-A1.pep
RDLELAYACAYPDTSDRPLNACQLLLSCHLLLLGVIIDLAVIWVIAVSCDNIHTNIHNRTHHTRSLHSLMSQLTHMSDLTHTDRFALTKPFPPAKSMNPATLMNRPTRY

SEQ ID NO: 109227 - protein, 168 aa, Gossypium hirsutum
  Clone ID: LIB3825-029-Q6-N6-A2.pep
CFFFFFFFFFFFFFFFFFFFFFFFFFFFFFFWGVWNRGEGGSPPQAPGGRGEGAWAPGSRFPTFRGGRQQEPLLTNLGPPSFYGGGDPPNRGGGGSTPGVSGRNRPVLDTGFAFPFGSGAGAPRERERGASKSSPLSFPGPLPRVPLWGGGPPKKSGTPFFGGLFSPP

SEQ ID NO: 109228 - protein, 165 aa, Gossypium hirsutum
  Clone ID: LIB3825-029-Q6-N6-A8.pep
LGQGGRGGQPPNKNPEKEKQKSPEPANTANKAKKKQRGRGKGNPERTEKNRTPAKGAKQQQKNQKPTIENQKTPKVRGHGRGGKPGNAGPAPAGAPPGPRGRRQKAGRNHRKRGAPGEKGNRAQSPPPEKPEPQRRKPGGPKEGAKRKKRGGPKGEPPNPKTRRA

SEQ ID NO: 109229 - protein, 92 aa, Gossypium hirsutum
  Clone ID: LIB3825-029-Q6-N6-B10.pep
IAKEGTTMLLPSSAANPANMIAQALTMYKSLVSNSSTGDSHVSNSLELSRSTKHAPPGETEGEIPNPRAVEARDTNHVGEVGFSLQSSKKKE

SEQ ID NO: 109230 - protein, 107 aa, Gossypium hirsutum
  Clone ID: LIB3825-029-Q6-N6-B12.pep
RCRPDLSTDVWRVLEPMRASCGGSSSFQLGSEEQCHPPSYFICPIFQEVMQDPHVAADGFTYEAEALRGWLDSGHDTSPMTNIKLAHSNLVPNLALRSAIQEWLQQH

SEQ ID NO: 109231 - protein, 155 aa, Gossypium hirsutum
  Clone ID: LIB3825-029-Q6-N6-D2.pep
GGRVVCAPLVPAVDVPPVKFVACRSLVLGVNFPGRGGVGPLCVAPSVFPPPLLPRCRRFPPGCSFVPFFPPPRAPTLQLFSVFVCLPPGVFFKAGVRFFSVLGFVPPPPFFACIGGFLLAICLLFSLFFSSGTSAFSPPPLVRPPPAAHGKRPRT

SEQ ID NO: 109232 - protein, 74 aa, Gossypium hirsutum
  Clone ID: LIB3825-029-Q6-N6-D4.pep
TKDLTVLGVDLAKVAIIDNSPQVYRLQVNNGIPIKSWFDDPSDCALISLLPFLETLVDIDDVRPVIAKKFGNKE

SEQ ID NO: 109233 - protein, 118 aa, Gossypium hirsutum
  Clone ID: LIB3825-029-Q6-N6-D8.pep
APGAFFWPFFLEWPKTRGPWSAFLDGRSPPPPFFSPPPSISLPRASFGFSPTGFPFPPGGFPTPKLVPPNPPFYFPPNGLITQNLGFPGTPLGKKARKCFSPRPGLGPFMILPPPECG

SEQ ID NO: 109234 - protein, 135 aa, Gossypium hirsutum
  Clone ID: LIB3825-029-Q6-N6-E2.pep
QFKPFVFGQPFQPSSASVNSSSDTPKKNEVSSKVKADQQPNPAEADKTTSFVKPPGAQEKSSASGAATDPFGDARAKVQKKINREFAAIMAAGTLRANEAAALATRKVMPKYGPFNVVMPQSLKPANVIYSGPAL

SEQ ID NO: 109235 - protein, 143 aa, Gossypium hirsutum
  Clone ID: LIB3825-029-Q6-N6-E4.pep
GPEGPPKFSPPNKGGTPPKPQKWGQKNPGAPPEGKNGPPKKTPLLKTRTKPWGQKLGGEKPPWLGTRNPPNPRGGFPQPLNQGLFGKFSPGSRGGKPKGGFPPKKPFAPPKKAFPFKNPGLNRAPPGNPKTPLGKKARFPKPG

SEQ ID NO: 109236 - protein, 60 aa, Gossypium hirsutum
  Clone ID: LIB3825-029-Q6-N6-F2.pep
IYRTLGLTPKSLTGTCKRTNYPYHEKAHKLAALMIIAETCVIIEIRPHFHTCITTHTDRN

SEQ ID NO: 109237 - protein, 129 aa, Gossypium hirsutum
  Clone ID: LIB3825-029-Q6-N6-F6.pep
KRFVDQVEQNIEFMQRKRDEVAFSPKDHQIVDSFLQFEKSNANASFTQYYKSIIEKAASSKPVMNQKISSLSQKKPKRKERRLPNSTVHLNAIDEVVEEKKKSTDNGGGGKMRKKRITKTLPLLTNTQE

SEQ ID NO: 109238 - protein, 71 aa, Gossypium hirsutum
  Clone ID: LIB3825-029-Q6-N6-G4.pep
AARGDPFKKPPTLKRVHKTFKGPPPSGGGSKKIPQFRAPPTLNPKKKPLGAAYLKKKPPLGGANFRGGNWL

SEQ ID NO: 109239 - protein, 68 aa, Gossypium hirsutum
  unsure (1)..(68): unsure at all Xaa locations
  Clone ID: LIB3825-029-Q6-N6-G5.pep
QEVGHHIATGGHAGGGGIGGTGYTTGVFNRGDPGGYGGAGVHPTVGPHAGSGXDTGRQYYLSSMGFVR

SEQ ID NO: 109240 - protein, 65 aa, Gossypium hirsutum
  Clone ID: LIB3825-029-Q6-N6-H1.pep
TYGMYSLVKMFDFGYVNMTHAKRAYLFCAFDQVLDMLILVSRLWHIYLCELCLICFVKNVVNNSA

SEQ ID NO: 109241 - protein, 84 aa, Gossypium hirsutum
  Clone ID: LIB3825-029-Q6-N6-H4.pep
SLIFFPFFLLFFFCENKCQVKKAVQTRKKRYPYPKRLQVLPRDVCLKVRNKRRYLKYYLPNCWLSLSGFFSCRINNGCIDDTPI

SEQ ID NO: 109242 - protein, 100 aa, Gossypium hirsutum
  Clone ID: LIB3825-030-Q6-K6-A3.pep
GAWLLYKCFDLSVSLCQDFEMGSCFSSAANGKSGNKRDDQVTDASTAITCASPKKQKQRQGLGRWRKKSSGLVPMGEAELHLIPGRMFLNGASSVACLYT

SEQ ID NO: 109243 - protein, 104 aa, Gossypium hirsutum
  Clone ID: LIB3825-030-Q6-K6-B2.pep
VIAHSIAFVVLNCGVDSPDNWITTSMVQFGCYDGGLRVSSVMHVIVFILSYTLYSFFYIRVQCFHMASFSRQKTLTLVHKGIIIGNSILRCGCTQSIGMGFRSK

SEQ ID NO: 109244 - protein, 72 aa, Gossypium hirsutum
  Clone ID: LIB3825-030-Q6-K6-B5.pep
EVDLSQVAFGSRSCITVSLYQTGPQWSFKISVIGPDRRILSSCSAIFIFLYCRYLAIWLSPDCTQFNYLDAL

SEQ ID NO: 109245 - protein, 66 aa, Gossypium hirsutum
  Clone ID: LIB3825-030-Q6-K6-C11.pep
KLFMCLKDSYLMVSVCLTLRKGMFFPCPHSTNSNGQLTYPLCIDKVKATLLLPNLLFTLVPSGGLK

SEQ ID NO: 109246 - protein, 81 aa, Gossypium hirsutum
  Clone ID: LIB3825-030-Q6-K6-F9.pep
VAARPEWQNDTHREKGHISRRWLWVRSTTPLLLLTHSTGPYTTTTIDCYCTSRVYPRYCLKQARPSCFDSNCITASIAQKA

SEQ ID NO: 109247 - protein, 164 aa, Gossypium hirsutum
  Clone ID: LIB3825-030-Q6-K6-G1.pep
MGSSSSSSFRPQQQAMGFVMEESNQIFNQEHQSQHGLLGNSKPFQGLMQFPPDNNNNNNNNAASNASSAANLFNLSFLSNSGNNGGAGDYNLTSSGLLISDNFNNENGGNGGTNNASNLFSNNLMSDQMTSNIPSLFSSSVQNNNMVPQMSATALLQKAAQMGS

SEQ ID NO: 109248 - protein, 80 aa, Gossypium hirsutum
  Clone ID: LIB3825-030-Q6-K6-G3.pep
YLYFETPYGYGGAFLLLILQVVSNCESPSHSAFACAHVIVLVTSQFPQAMDLVLAEIHRACIYTVPKHISYTKVTFLYLM

SEQ ID NO: 109249 - protein, 77 aa, Gossypium hirsutum
  unsure (1)..(77): unsure at all Xaa locations
  Clone ID: LIB3825-030-Q6-K6-H10.pep
EKSGITIRFLPIDAGQKANYAHPGLPMGXAPEGHILYDEILRSNPKNPYWTNRERFVLTRAHGCMMQYAPLYLAGYD

SEQ ID NO: 109250 - protein, 171 aa, Gossypium hirsutum
  unsure (1)..(171): unsure at all Xaa locations
  Clone ID: LIB3825-030-Q6-K6-H2.pep
RQRQRNXKERVYVCPETSCVHHNPARALGDLTGIKXHYCRKHCEKKWRCERCSKTYAVKSDWTAHIKSCGTKEYKCNCGTVFSRRDSFYTHRTFCDALAEENARAQAATSSPPPLTPSTTTMVSPGLSTQSSGQIFVILFYMRILIITCRVSTNAYIEIEITGWVNISFGI

SEQ ID NO: 109251 - protein, 76 aa, Gossypium hirsutum
  unsure (1)..(76): unsure at all Xaa locations
  Clone ID: LIB3825-030-Q6-N6-A10.pep
SWHLPHLCGVRGXYSLIMQQQNAXHDTHRMMQMGGLGFDPTNSLSDEKDGLGIVQQDWALPIFKHRAETVVKKLAS

SEQ ID NO: 109252 - protein, 74 aa, Gossypium hirsutum
  Clone ID: LIB3825-030-Q6-N6-B2.pep
LGAYQFWQYIGAYAEVPRMIRVNGSLFNSRIATVRSERPVTLGFVRWLAFFFFQDRARNVVPYKPSVWSRCHGQ

SEQ ID NO: 109253 - protein, 89 aa, Gossypium hirsutum
  Clone ID: LIB3825-030-Q6-N6-B5.pep
SAAQSNKNHIPWQPQSRKMKLAAPGRKSATIRAYNRYFRMTIEGLFDILIRGLHDTATKGRLERNHPLTCQSLSQDGGSRSQWNLFNLS

SEQ ID NO: 109254 - protein, 69 aa, Gossypium hirsutum
  Clone ID: LIB3825-030-Q6-N6-D5.pep
KLGKVATWVSAPVVSPFFPFSGAFPGLTSPPRALGMAPIPTGPRAALSPTPENLSGDLPRQKLSCFFLI

SEQ ID NO: 109255 - protein, 79 aa, Gossypium hirsutum
  Clone ID: LIB3825-030-Q6-N6-D9.pep
TVRSIFVALMQDLSEAVTAEELARYLDLKKLDERVYMFEAVSAFDGTGIKEGAEWLVEVMERSKRTEMLRNRAGMTGPT

SEQ ID NO: 109256 - protein, 120 aa, Gossypium hirsutum
  Clone ID: LIB3825-030-Q6-N6-F7.pep
GLTVLVKKVAPPPRKKNARLSFAFVYPPKNGRFLVKKVGKPFFSSNVGGLDATKPLGELSFEIGDYLEGGIMSWGLFFVQKVPWIGRGSNAFPLSFSPYVRKSPKKSQFWGIYLCKRFGR

SEQ ID NO: 109257 - protein, 91 aa, Gossypium hirsutum
  Clone ID: LIB3825-030-Q6-N6-H10.pep
FLLLLKSKKDPKGTIIMPAKFLCCCNNSTMGLNRILCITYQLEHLPQTGSMSDCLPFQYPQSLSHPKDCIPTQSLTSNTPPPGTNTFFVGP

SEQ ID NO: 109258 - protein, 126 aa, Gossypium hirsutum
  Clone ID: LIB3825-030-Q6-N6-H12.pep
VAGVNITFMIMQMLDLDALKPRTFIRSVFLQMLSGKSLQLMLVKQQSNGIYQLNGFCVWFATENEWAFDLLYCVAFVVMDKQWLEKNATYMEFNEVLKSTRTQLERELLMDDVLRIEDMPSFTLLC

SEQ ID NO: 109259 - protein, 125 aa, Gossypium hirsutum
  Clone ID: LIB3825-030-Q6-N6-H2.pep
LSSPLYLSNNSFSSIFTAPSLQPAMSATALLQKASQMGAAATSSPSLLRGLSFAVPSSSSTTPSTGHKPTSTLDLLGLGICGGGGGGRGGTSNGLSALFTQFGGGFNGEPGATTSYGAPNSSALL

SEQ ID NO: 109260 - protein, 205 aa, Gossypium hirsutum
  Clone ID: LIB3825-031-Q6-K6-A6.pep
GRVGGRVGDELSIVYGDESLPRLYENSRISTDQLPGQSGIVRRAVALGRYLQNPLAMVATLCGPGKEILSWKLNPMENFLTADEKYGMIEQVLVDVTNQVGLDANLAASHEWLFAPLQFISGLGPRKAASLQRSLVRVGTIFTRKDFLSAHGLDKKVFVNAVAFLRVRRSGLAANSSQFIDLLDDTRIHPESYLVAQELAKDVYD

SEQ ID NO: 109261 - protein, 195 aa, Gossypium hirsutum
  unsure (1)..(195): unsure at all Xaa locations
  Clone ID: LIB3825-031-Q6-K6-C10.pep
DLIKEAGVXSGKVNPSRKLRGKEGRKVESASGDTTFQALKTYGRDLVEQAGKLDPVIGRDEEIRRVIRILSRRTKNNPVLIGEPGVGKTAVVEGLAQRIVRGDVPSNLADVRVIALDMGALVAGAKYRGEFEERLKAVLKEVEEAEGKVILFIDEIHLVLGAGRTEGSMDAANLFKPMLARGQLRCIGATTLEEY

SEQ ID NO: 109262 - protein, 60 aa, Gossypium hirsutum
  unsure (1)..(60): unsure at all Xaa locations
  Clone ID: LIB3825-031-Q6-K6-C11.pep
PVFRVDRGYPGLKRLKRGHDDGDGAGTPPVPLAGARPASGEEGRVGRMRVFSVLLKPTXP

SEQ ID NO: 109263 - protein, 82 aa, Gossypium hirsutum
  Clone ID: LIB3825-031-Q6-K6-D6.pep
FLEFYVIIRIIRMRFYHITLPYITLPAKSPTIFVSVIKFFYKSTLYSPLNPFSPVVEIKNKELKSTALFYNSVYFIGTLRFL

SEQ ID NO: 109264 - protein, 101 aa, Gossypium hirsutum
  Clone ID: LIB3825-031-Q6-K6-E11.pep
KRRDGKNPGVPKLNRLEKNPLFPSWGNSKKARPDRLSKNLPTLNGKGTPPFTGPLTAGGGGVTPRGTVTFASALAPALFVFFLSFFATLAGFPRKVLNGGL

SEQ ID NO: 109265 - protein, 84 aa, Gossypium hirsutum
  unsure (1)..(84): unsure at all Xaa locations
  Clone ID: LIB3825-031-Q6-K6-F4.pep
MMERAESCQKLYTRLRLWEFPDEYVIEPTDGSSASSLKINRADASMKLIDAIPECSSVRVPKIQTIFGVVGMLKLVAGSYLIXI

SEQ ID NO: 109266 - protein, 200 aa, Gossypium hirsutum
  Clone ID: LIB3825-031-Q6-K6-G12.pep
INLRGCPHLASLPDLSGHKNLQKIVLAYCVKLINIDKSVGTLISLHHLDMTGCLNLVEFPSDVSGMKNLQTLVLTDCSNLKELPEDIGSMRSLKELYVNRTCIEKLPESIYRLEKLEKLSLNHCIHIKQLPRCVGKLASLKELHLDGSGLQELPDSVGSLENLEKLSLISCESLTAIPDTVGNLNSLKRLFIKGKAITEL

SEQ ID NO: 109267 - protein, 193 aa, Gossypium hirsutum
  unsure (1)..(193): unsure at all Xaa locations
  Clone ID: LIB3825-032-Q6-K6-B11.pep
GSPTSGRVGEFLSGCLNPREIVIEDVHKIGGTPAVIRYLLEFGYLDGDCMTVTGRTLAENXKSYPCLPEGQDILKPVSNPIKKTGHIQILRGNLAPEGSVAKITGKEGLYFSGPALVFEGEEAMLAAISENPMSFKGKVVVIRGEGPKGGPGMPEMLTPTSAIMGAGLGKDVALLTDGRFSGGSHGFVVGHVC

SEQ ID NO: 109268 - protein, 163 aa, Gossypium hirsutum
  unsure (1)..(163): unsure at all Xaa locations
  Clone ID: LIB3825-032-Q6-K6-C6.pep
KLHRLPPVTLTKEQQAIHHKSRSSTYQWXKRPTIFLKEGDSIPSDVDPDTIRWITANHPFATTANDIDEYLAQNNVFHKHGVPLRIQAEHDALQRKLEALQTEDNLNNLIIDSRNAKHFQRPFTLNDRSDKPVDQGPNNNSRVETKPTKPEHAFDSIESNLYS

SEQ ID NO: 109269 - protein, 61 aa, Gossypium hirsutum
  Clone ID: LIB3825-032-Q6-K6-D10.pep
GTFCQEFLLGKKGVLQVLILYRDGLLIVKLTVTSQASIIQHGHVSVALNVTMQVEVLRYKT

SEQ ID NO: 109270 - protein, 180 aa, Gossypium hirsutum
  unsure (1)..(180): unsure at all Xaa locations
  Clone ID: LIB3825-032-Q6-K6-D9.pep
XAWAGLCISEEICNGSQAEFIISDPSPSSGSTVSDMHDPASDRIMNSVNDSQNSQTESSSVHSVGFWTNGGLLGLQPSKPPDFAVSTVGQGSAATTSEVFGPPNQILMSLQDGLKGNAGTVVENANLDANLGRPVNSHFNDNLDNLNGVGSILNTSLPHGNKNPVNPNIKATSIDSDEEG

SEQ ID NO: 109271 - protein, 194 aa, Gossypium hirsutum
  unsure (1)..(194): unsure at all Xaa locations
  Clone ID: LIB3825-032-Q6-K6-E4.pep
SHTPRNENTDVLQSLAKCKQXSKVVLSGTLYQNHVKEVFNILNLVRPKFLRLDTXKSVIKRIMSKVHIAGVKKQLKAGADAAFYDLVEHTLQKDENFERKVSVIHDLREMTSKVLHYYXGDFLDELPGLVDFTVVLSLGPRQKDEVHKLRRFQRKFKISSVGSAVYLHPKLNSFSENSDTTDDKMDELLNTLDV

SEQ ID NO: 109272 - protein, 95 aa, Gossypium hirsutum
  unsure (1)..(95): unsure at all Xaa locations
  Clone ID: LIB3825-032-Q6-K6-F7.pep
SHAGTDLTPYAFXQFHKELLLSPQYASFVGDEGCLDVKHHTQMXGGCKVIXVLCEEQISCKYHNFEFAGILSKHVIHVLSKNNCLHIPDPYLPRR

SEQ ID NO: 109273 - protein, 133 aa, Gossypium hirsutum
  Clone ID: LIB3825-032-Q6-K6-F9.pep
MRLTKKMMMNSNCSGPPPLPHNKAAVNDSKYQYPIQDSDEKNYFSKTNNTIRVCSDCNTTTTPLWRSGPRGPKSLCNACGIRQRKARRALEAAAANGETVAASMKIRVHHNKKEIKKSRTVGQYKKELKSKSG

SEQ ID NO: 109274 - protein, 188 aa, Gossypium hirsutum
  unsure (1)..(188): unsure at all Xaa locations
  Clone ID: LIB3825-032-Q6-K6-G8.pep
XTGHQTYLKWVWVEIARKQLFIDGHLLGETVKSVFLQDVSWGLNVTHLDIETMDPDYDGNLMXCLANDISEALALTLSVAAEEEKLFLYXERTQGTGYELIPEGSNIXVLTRINTTMFDWVGDHRIYDSYFSLTRSXYLEGFRELNPKKSIGEHNDNELEILIRDTSDVHLDDMRANTEYSGYRASLP

SEQ ID NO: 109275 - protein, 91 aa, Gossypium hirsutum
  unsure (1)..(91): unsure at all Xaa locations
  Clone ID: LIB3825-032-Q6-K6-H9.pep
FNRDKLLHFLHKPLPWAEIHKTLXIMEKLLQXFLNADVIGVHTXNYTKHFLSGNIRMLVLTYKNERGYIGVEYYGKTDTIKRLPIEIHMGQ

SEQ ID NO: 109276 - protein, 42 aa, Gossypium hirsutum
  unsure (1)..(42): unsure at all Xaa locations
  Clone ID: LIB3825-033-Q6-K6-A11.pep
XXAXKQQAQSGCYHLEVAITPFPSKQSNSDLFINDVCFFSIT

SEQ ID NO: 109277 - protein, 94 aa, Gossypium hirsutum
  Clone ID: LIB3825-033-Q6-K6-C11.pep
MITFTAVIIFKFICSLNSVGHGGTDGLHAYVHSLDDAVVDLKIFLDKVLAENPGLPCFCFGHSTGGAIVLKAVLDPKVEAQVAGIIMTSPAVAI

SEQ ID NO: 109278 - protein, 51 aa, Gossypium hirsutum
  Clone ID: LIB3825-033-Q6-K6-C7.pep
TSVITKHNSTTFYISSSSLFNPHATFLWKMHFTMLIPFYFLSSLPSRLQIH

SEQ ID NO: 109279 - protein, 158 aa, Gossypium hirsutum
  Clone ID: LIB3825-033-Q6-K6-C8.pep
GVSVTTIFYVSCGALGYAALGNNTPGNFLTGFGFYEPYWLIDMANVFIIVHLIGAYQVFCQPIFKQVEDRCFNRWPNSSFIKESPPIKLPLFGVYSFSALRVVWRTGYVILTIVLAMLLPFFNGILGFLGAASFWPLTVYFPIQMHISREQIQALVER

SEQ ID NO: 109280 - protein, 105 aa, Gossypium hirsutum
  Clone ID: LIB3825-033-Q6-K6-D8.pep
FFFSSFFNFLLLGRGFFFPKLLCYSWHFLNIKQVLVNIKFVSNFMSFSKVPHLLIFKKICFFLIALWYASFCGSLNLVFFFFTPIMTGSFALALFFFSSFFFSSF

SEQ ID NO: 109281 - protein, 69 aa, Gossypium hirsutum
  Clone ID: LIB3825-033-Q6-K6-E12.pep
KHPPPKKKGFYYPFIYIFIHFNLKNLFFLLYFYHFFFYFFIFFFFFFFFFFFFFIYIYPPYFFFFYFLI

SEQ ID NO: 109282 - protein, 123 aa, Gossypium hirsutum
  Clone ID: LIB3825-033-Q6-K6-G7.pep
PASGQAVNSICQGSAADIIKIAMIKLHSVIVEGVDSLESGSSILTKFHMLKGRCRILLQVHDELVLEVDPSVIDEAASLLRMSMENAVSLLVPLRVKLNVGKTWGSLKPFQADQQMEEAISNV

SEQ ID NO: 109283 - protein, 195 aa, Gossypium hirsutum
  unsure (1)..(195): unsure at all Xaa locations
  Clone ID: LIB3825-033-Q6-K6-G9.pep
WSIQKSPASSLTGLSSASSFSTFHRGAWCTPPRLFLEDQFDVVPPDTGSVSSYGKKXVGEEPIKKKNPGAVKISPWTLARLNAEDVSKAAAEARKKSKILQPVVRRETSSGLEAESSFGSSGRQVFSRADSRRRASKRVRLPADLPMDPLMTISAKDTSSSLAPLQLEARSAFQTSRAMSSYAGIVASSPESSLD

SEQ ID NO: 109284 - protein, 202 aa, Gossypium hirsutum
  unsure (1)..(202): unsure at all Xaa locations
  Clone ID: LIB3825-033-Q6-K6-H8.pep
PXFSRGGTGIAFSSSAAESCSISRCNNVWSEAASSESVEMLLKSVGQDETIPVQTISKNSDACDELGCIINQMEPTLKHGDSGLPKVGDDLQPALQSGECPGKLPGLKDDIGGDHLLVEDVSQTHEFGTSVDSTLDDLNTRNTDLPVTKRDDSKEHTVNESLVEASVDQSVDDREQEDKCTGSQVDAVIHSVQNAYASNALI

SEQ ID NO: 109285 - protein, 83 aa, Gossypium hirsutum
  Clone ID: LIB3825-034-Q6-K6-A6.pep
SHLSSLLTSKCNVEQFTIPVPNYHQIIGLAHCIIGRGRQVLGQPHQLLSQQHHLITAALTLIIAQLISTDSSLLPCAKHDTLC

SEQ ID NO: 109286 - protein, 75 aa, Gossypium hirsutum
  Clone ID: LIB3825-034-Q6-K6-C11.pep
KHGTVLNIKINSIQQERGLTKIENKYTLKIKNYGNCMADDGYKWRKYGQKWIKNTPNPRSYYKCRNPRCSAKKQV

SEQ ID NO: 109287 - protein, 203 aa, Gossypium hirsutum
  unsure (1)..(203): unsure at all Xaa locations
  Clone ID: LIB3825-034-Q6-K6-C5.pep
XLFTKFYHGFCKQHLWPLFHYMLPLSPDLGGRFDRSLWQAYVSVNKIFADKVMEVISPDDDYVWVHDYHLMVLPTFLRKRFNRVKLGFFLHSPFPSSEIYRTLPVRDEILRALLNSDLIGFHTFDYARHFLSCCGRMLGLSYQSKRGYIGLEYYGRTVSIKILPVGIHIGQLQSVLNLPETAAKVAELRDQFRGQTVMLGVDD

SEQ ID NO: 109288 - protein, 192 aa, Gossypium hirsutum
  Clone ID: LIB3825-034-Q6-K6-C7.pep
RVGHRAFSGLLRSDVTCTTCGFTSTTYDPCVDISLNLDTVNSSAAEKTGLSTLSGCLNLFTRAERLGSDSKLHCQNCQELRDTSKQLSISRLPLVLCLHIKRFEHSLIRKTSRKIDQYLQFPFALDMTPYLSSSIVRSRFGNRMFAFECENTDSSAEYEIFAVIAHSGMLESGHYVTYLHVNNQWYKCDDAW

SEQ ID NO: 109289 - protein, 41 aa, Gossypium hirsutum
  Clone ID: LIB3825-034-Q6-K6-D10.pep
SGRFSFVPAGFLQSRGRVNCVQLTLFRCHYVAGTRSQACVR

SEQ ID NO: 109290 - protein, 197 aa, Gossypium hirsutum
  unsure (1)..(197): unsure at all Xaa locations
  Clone ID: LIB3825-034-Q6-K6-D12.pep
GAVVYPLRXGLKSPISRLSISWSRGNSLRVSVFAAPSSDGSVNDGDGGKVVEVKLGGGDGEISEAHWRRIAYGSVSPFALLQSRKNAVSSLSKMSMNSSPYDGDWWDYIMEYSKDINALLVNQKSASVPVLDDTKSVITKGEEPTSLKAAWELLEMFYAEKPSHSWLPERLVDWLAVVEDDPKYWEVMSSALAVGWL

SEQ ID NO: 109291 - protein, 156 aa, Gossypium hirsutum
  unsure (1)..(156): unsure at all Xaa locations
  Clone ID: LIB3825-034-Q6-K6-F4.pep
MQAQYENGAGAMVKTNSKRQRTRVXWLRLGDKNTAFFXEQATQKRQRNLIRKMQDETDKLQEMEMIARMYFQKLFYASSKAKFEYVLSXVPRCISKEYNAMLMERYTKEXIQQALSELGPTKEPGEDGFPALFYQKCLGIIGEVAIFCLNRLNEGM

SEQ ID NO: 109292 - protein, 57 aa, Gossypium hirsutum
  Clone ID: LIB3825-034-Q6-K6-F9.pep
YNGGEIKTWWCSREQTFWWTFLILGVFIILQLCINIQMLLLCTSYITMPWWMYCLLS

SEQ ID NO: 109293 - protein, 84 aa, Gossypium hirsutum
  Clone ID: LIB3825-034-Q6-K6-G11.pep
ARPKLAYYNNLLDQKKKKKKKKKKKKKKKKKKKKKKKKKKKKKKKKKKKKKKKKKKKRGGRFLKEPNLITGVWQIKIFFLGPLN

SEQ ID NO: 109294 - protein, 71 aa, Gossypium hirsutum
  Clone ID: LIB3825-034-Q6-K6-G9.pep
SYAHPTGIINTAKMQNPYARIFFSNRTQIYINKKHGVKIITFQIAPFDQSILNIEKILFHNLTSFGSDFCS

SEQ ID NO: 109295 - protein, 55 aa, Gossypium hirsutum
  Clone ID: LIB3825-034-Q6-K6-H8.pep
RSSTLMINHDFVKKKIFYLIKRFSNDSLRLLIYRAAVAISEHCHRSPFSLYGPAV

SEQ ID NO: 109296 - protein, 197 aa, Gossypium hirsutum
  unsure (1)..(197): unsure at all Xaa locations
  Clone ID: LIB3828-023-Q6-K6-B11.pep
VRKVAPXILTGGGGGIDRQFTSLIKLGNGMMTSGNGINXXFSMKTKMYLFTNGAHATNVSGXGADGNVSACDTGTLGENKVKGKIVYCLGNSGQDYTIRMLDGAGTIMAVDEPTDYYFLTLIPATIVLRNKTGDRLDRYINSTKNPQAVIYKTRTVHMKAPFVASFSSRGPQLTNFNILKVKSIFSPPSPIALYFHF

SEQ ID NO: 109297 - protein, 94 aa, Gossypium hirsutum
  unsure (1)..(94): unsure at all Xaa locations
  Clone ID: LIB3828-023-Q6-K6-B12.pep
SSLGEEERAKSPVHPKNEEQTRLRFAIASRRNTTQPQRRILIXADPSVPIPTRRNMKTDRRLIGKPPLIVFYHSKSXISSXPXXPQHPLXRXEV

SEQ ID NO: 109298 - protein, 165 aa, Gossypium hirsutum
  unsure (1)..(165): unsure at all Xaa locations
  Clone ID: LIB3828-023-Q6-K6-D9.pep
MCVXNLXPGVTIEELRDLFGGXXXVGSIKLKRGFFDHWPWFXXXYTDEGGXPEGDXVLSYEDPRAAHSAGGFFLFPVLRGSXXXVALAEKTAPTVYDHGGGQGGFGGGGVWRXVRFXDGGSGPVRLLHGGXRSRPFCEASRFLCFLPLRMWSLGFWLCLFVGVCS

SEQ ID NO: 109299 - protein, 63 aa, Gossypium hirsutum
  unsure (1)..(63): unsure at all Xaa locations
  Clone ID: LIB3828-023-Q6-K6-E11.pep
VKEXXKCWAPIHXSIANXNECIXXVWFISATQRKAMXILYLHXXVHFKRGVGRQXEELXXGTL

SEQ ID NO: 109300 - protein, 201 aa, Gossypium hirsutum
  Clone ID: LIB3828-023-Q6-K6-E7.pep
PASGKLIGAKYFNRGYKAYLGEKLNATFKTVRDHEGHGSHTLSTAGGNFVDGASVFGYGNGTAKGGSPKARVAAYKVCWPPVNGNQCFDADIMAAFDAAISDGVDVLSVSLGGEPAEFFEDGIAIGSFHAVKKGISVVLSGGNSGPDPGTVSNLSPWMFTVGASTLDREFTSYVELGNKIRLKGASLAAATLKSKTSYPLI

SEQ ID NO: 109301 - protein, 82 aa, Gossypium hirsutum
  unsure (1)..(82): unsure at all Xaa locations
  Clone ID: LIB3828-023-Q6-K6-E9.pep
TEETPNSPAKERKGKRNQEDKSKGRRKRSHTEKQQAPTGQPKIHIKLKKRGKIXPRGTRQRSKRKKNXPEQKSKAKKAHRQT

SEQ ID NO: 109302 - protein, 185 aa, Gossypium hirsutum
  Clone ID: LIB3828-023-Q6-K6-F11.pep
MDLGEGLESPHPSHNSGMEASPIPSPSSTAAAPTPALILTNTGKRIDRMGSSLTGGSSGITDHSATPSPSSIAKTPALILSNSAKRIDRMSSSLTSSSSGTGEPSATPSPSSTANAPALVLSNSGKRIDQAAKKKYVKQVTGRHNDTELHLSAQRGDLAAVKQILADIDSQMMKTASGEDFDMEV

SEQ ID NO: 109303 - protein, 107 aa, Gossypium hirsutum
  unsure (1)..(107): unsure at all Xaa locations
  Clone ID: LIB3828-023-Q6-K6-G8.pep
TPRARGGGACQNRVGGNADGSYQALGLFXXAPFYCGRVYTCIFLFFFSPXXDYLLWRFTLFXFSIHSFLEGWIISASSRKVCSSSRSLSCLEKNSVVTCLVFTGLCV

SEQ ID NO: 109304 - protein, 197 aa, Gossypium hirsutum
  Clone ID: LIB3828-023-Q6-K6-H7.pep
NKGSWIDMMMGLLALLLLLAFASLQLFCFADDDNNDDDVVFYESFEESFEGRWIVSNKDDYKGLWKHSKSEGHEDYGLLVSEKARKYAIVKVVDEPVSLKDGTTVLQFETRLQSGIECGGAYIKFLRPQEAGWKPEEFDNKSPYSIMFGPDKCGTTNKVHFIFKHKNPKNGEYVEHHLKYPPSVPSDKLTHVYTATL

SEQ ID NO: 109305 - protein, 61 aa, Gossypium hirsutum
  unsure (1)..(61): unsure at all Xaa locations
  Clone ID: LIB3828-024-Q6-K6-B12.pep
SPLXSASDSLLPSAVCFFVXSXRLNGGGGGGLFGGVFHLVALLAHISVARLGLVVRPLCFF

SEQ ID NO: 109306 - protein, 182 aa, Gossypium hirsutum
  unsure (1)..(182): unsure at all Xaa locations
  Clone ID: LIB3828-024-Q6-K6-B7.pep
NPNXTRKXXLSVCAIGXXLXSSPNCXXCXXPSXLGXGXVIVGLYKWXTIXGXXIRMCGLVVXFXXLFXXGXXGLXXFGCXXNSXXGKXPGCFYQGXCXXLXSXXXVXGLLIXHLXXSXYSXXWAXVLFISKXXSSXXSEENGPPXDMXFTXSIPXMAXLLFSAFPFTRXXDXHXXSSLXXNF

SEQ ID NO: 109307 - protein, 198 aa, Gossypium hirsutum
  unsure (1)..(198): unsure at all Xaa locations
  Clone ID: LIB3828-024-Q6-K6-C10.pep
FNIYPXQIPSWXGEFMPCRGGYLIGNLQPAHMDFRFFSLGNLWSIVGGLATVDQSHAILDLVEEKWSELVADMPLKICYPALEGQEWRIITGSDPKNTAWSYHNGGSWPTLLWQLTVACMKMNRPEIAEKAVMLAERRLSRDKWPEYYDTRRARFIGKQSRLFQTWSIAGYLVAKLLLANPSAAKVLITEEDSELVNA

SEQ ID NO: 109308 - protein, 96 aa, Gossypium hirsutum
  unsure (1)..(96): unsure at all Xaa locations
  Clone ID: LIB3828-024-Q6-K6-C12.pep
LSWFLLXCHFLISIPTLYAYVKWSWRIFTSIFGVRKVIVCSCFFKGSKNSSFFFPLFILFMLFFTILLNTFSFVLLLSVFLFLCFLFSLVFIPFFF

SEQ ID NO: 109309 - protein, 147 aa, Gossypium hirsutum
  unsure (1)..(147): unsure at all Xaa locations
  Clone ID: LIB3828-024-Q6-K6-C9.pep
PGFAPTPFSLALFHHXIWRECKKAVLLLMRVVWIYIYMFQPICSPXMGAKKDSSSSIYSRLGSHAFAXXIMLVHIHFLSYRXNGGRVRYASNNXCSVPHGSFLVSDQPGAFXIDSLSQVXSLALXDFNPPRLXGVYGLXPGXCGLPP

SEQ ID NO: 109310 - protein, 139 aa, Gossypium hirsutum
  unsure (1)..(139): unsure at all Xaa locations
  Clone ID: LIB3828-024-Q6-K6-D10.pep
METVTMSTPDIAEVDQFRCRVDEIFQKXDKLEKKVNEGEQFYLNANKKKKSSSKGNSIREEQDKGRHVPSIKKQQQDASQRESTAAKRMQELMRQFGTILRQISQHKWAWPFMQPVDVKGLGLHDYYKVTGIELMHFSF

SEQ ID NO: 109311 - protein, 56 aa, Gossypium hirsutum
  unsure (1)..(56): unsure at all Xaa locations
  Clone ID: LIB3828-024-Q6-K6-D11.pep
RVVPSVRHHXLQXQGGRGGGGGHQAKFCARSRCSYFFISHLVLFVLSLRLKFYTIP

SEQ ID NO: 109312 - protein, 95 aa, Gossypium hirsutum
  unsure (1)..(95): unsure at all Xaa locations
  Clone ID: LIB3828-025-Q6-K6-C9.pep
VSFIVWCGLVVRCIRXGACKKVYHPPSFVAARLILSFSWGADALGCVAVPPVVLFLAPLPVPPQRLDQHSSVAAAALPVLGSLVGACIVSLSSYV

SEQ ID NO: 109313 - protein, 66 aa, Gossypium hirsutum
  unsure (1)..(66): unsure at all Xaa locations
  Clone ID: LIB3828-025-Q6-K6-E12.pep
YWGGGVXLVSFEDPDXALRACADPSPTLVGRRANCLLASLGALYSTRAPPQHGGGGCVFLFCFGSC

SEQ ID NO: 109314 - protein, 132 aa, Gossypium hirsutum
  unsure (1)..(132): unsure at all Xaa locations
  Clone ID: LIB3828-025-Q6-K6-E9.pep
MDLREGNFCSWGVDYLKCDNCVPWMXSCISQKDLFAMXPPHWLEIVNGPIHFSLCDWGGGGPGXWAGACGXSWRTAGVVNDSFVSVTWVAASFIHWGRFAGPAVWVAPGIGKWAPVGSVSSTACLLFFLCIL

SEQ ID NO: 109315 - protein, 41 aa, Gossypium hirsutum
  unsure (1)..(41): unsure at all Xaa locations
  Clone ID: LIB3828-025-Q6-K6-G9.pep
YLCRIGVVCGCHDCPYXLTYCLNPQPIIPFLACPIGGGGQQ

SEQ ID NO: 109316 - protein, 133 aa, Gossypium hirsutum
  Clone ID: LIB3828-025-Q6-K6-H7.pep
LKQSLFCLQIRSLAWPAVLVGWVAQSASLGMKDSWGPLKALAVSSAINGIGDVALCMFLGYGIAGAAWATMVSQVVAAYMMIDALNKKGYNAFAISIPTFEELLSVLAIAGPVFVTLTAKVIFYSVLVYFATS

SEQ ID NO: 109317 - protein, 80 aa, Gossypium hirsutum
  Clone ID: LIB3828-026-Q6-K6-A9.pep
ISRGGGAYGISVQLATFLYHFEGWEFDRVLCVLFTDSKFGTVTGFNYSLCRHTWGVVLILQFCPVDSCCLLQASSTITKV

SEQ ID NO: 109318 - protein, 146 aa, Gossypium hirsutum
  unsure (1)..(146): unsure at all Xaa locations
  Clone ID: LIB3828-026-Q6-K6-B12.pep
AKEGEERHAKAERQSRTNGETKKQQGKSHTIXPQTRRKRQKGKRKGNKQRDTRERKGTPKIRKQETRREQRRPREKAPQREHKQGETETASPPPPPEGXXRXKKKKRRRRRRKPRARPPRNEXGKPHGKPAAGPNKAASAHPCPPG

SEQ ID NO: 109319 - protein, 155 aa, Gossypium hirsutum
  unsure (1)..(155): unsure at all Xaa locations
  Clone ID: LIB3828-026-Q6-K6-C12.pep
RCKNGSAGWDDAREPNLXPVLXTFQTDGTSPKFFFFNPSNIPGGGRCSFAVLPXAXVLMAGSITNPGCLDDALFPTVVRVVKFSPHYLDPXLAMFRLEIFAGLSALFFMFGLFFSVLFRGCGVFVPLLLRVSIYSPPFVSPGVCLCSWLVRLGIF

SEQ ID NO: 109320 - protein, 102 aa, Gossypium hirsutum
  unsure (1)..(102): unsure at all Xaa locations
  Clone ID: LIB3828-026-Q6-K6-C9.pep
RRQKARSRTGKRRGTQARTKRKRGGNRKRREXPTRKFEEEAHLRKPTTPHPSPAGGSAHKENSTKRDXXKSQQQKESQSAPSPSQPQERTQXREXPPRPPPP

SEQ ID NO: 109321 - protein, 109 aa, Gossypium hirsutum
  unsure (1)..(109): unsure at all Xaa locations
  Clone ID: LIB3828-026-Q6-K6-D9.pep
KNKKPGNSRRRRRREPHKLEKAEAEDEAGALNGKPFRAQTTNPPPRKKKATGQKRPGGKXSKNKERANQNXPKXHTPPRRWEAHPKNRXNIKPPPPNHNPXTKKRGXDP

SEQ ID NO: 109322 - protein, 128 aa, Gossypium hirsutum
  Clone ID: LIB3828-027-Q6-K6-A10.pep
ICSMESLVISSSKSNPPSTSGNPRPSRPPSPNRSENEKTISTSHVATLNHGVRIVRHPKGSIGYQKHSSKPADGNVQHEELPDAAKQCFDSSKGKSEKAENKSSFKHPIDDHKSASSSGSLESEKLCS

SEQ ID NO: 109323 - protein, 126 aa, Gossypium hirsutum
  Clone ID: LIB3828-027-Q6-K6-C10.pep
GNASKSADGAMILNTLKKKIVPSQVTVKLIQKEMELSDNHKFLIDGFPRTEENRVSFEQIIGVEPNVVLFFDCPEEEMVKRVLNRNEGRVDDNLETIKKRLTVFQALSLPVINYYSEKGKLYTVDI

SEQ ID NO: 109324 - protein, 49 aa, Gossypium hirsutum
  unsure (1)..(49): unsure at all Xaa locations
  Clone ID: LIB3828-027-Q6-K6-D1.pep
NERLITKLSFQPRIQQTSNATNQPTQLERQNNYIPHFIPPFSHRRQGDX

SEQ ID NO: 109325 - protein, 139 aa, Gossypium hirsutum
  Clone ID: LIB3828-027-Q6-K6-D10.pep
MGGMTPPPLKESTPGNGEPSPTKTQVPQGEKGGANPATKACQAEKEKHPPPTETKKHHPSPKKTATQKKDPPPPYQYTTSQNNYPAQPPTVTQQYPLIITPPLFFIYFFFLFFFLLFFFFFFFFFFFYHLNFFFFFFFI

SEQ ID NO: 109326 - protein, 60 aa, Gossypium hirsutum
  Clone ID: LIB3828-027-Q6-K6-D4.pep
ISWTKIVVLIKLNYLLKTTTFKVTRSHLIKKDWWPLSFSFSFSKSKSTLFKKKLVSTSTI

SEQ ID NO: 109327 - protein, 174 aa, Gossypium hirsutum
  unsure (1)..(174): unsure at all Xaa locations
  Clone ID: LIB3828-027-Q6-K6-D8.pep
AVGEYGGGGPTHKEXARELFESLELLLYENLSSSRLGLRQEAAVNSNRKSFSKSSQSRLLCFVITAITKLATHHRELLPRARVALIKVARSRISDSKVSKXAQVYLGLIDESGICLPVLGPSRPSHGFVHYPGTVNWNEGGNKMVAHIPFYILGEQEGPPFHDFSLSDVLPRRS

SEQ ID NO: 109328 - protein, 201 aa, Gossypium hirsutum
  unsure (1)..(201): unsure at all Xaa locations
  Clone ID: LIB3828-027-Q6-K6-F10.pep
HICGMTXXGVNDAPALKKADIGIAVDDATDAARSASDIVLTEPGLSVIVSAVLTSRAIFQRMKNYTIYAVSITIRIVLGFMLLALIWKFDFSPFMVLIIAILNDGTIMTISKDRVKPSPMPDSWKLKEIFGTGIVLGTYLACMTVVFFWAANDSNFFSDKFGVRSIRHNQDELTAAVYLQVSIVSQALIFVTRSRSWSFIE

SEQ ID NO: 109329 - protein, 72 aa, Gossypium hirsutum
  Clone ID: LIB3828-027-Q6-K6-G5.pep
HKDKEESHYGKPQRVAVDSPLHPAVYSSHCEMTVDSPPQLLFLTLLFIVKLLFYMSGDKIASQSLFFQFNMT

SEQ ID NO: 109330 - protein, 178 aa, Gossypium hirsutum
  unsure (1)..(178): unsure at all Xaa locations
  Clone ID: LIB3828-027-Q6-K6-G6.pep
LGKAYDRVSWEFIEASLRVAGILDFLINVIMSSISNSTMQVIWNGIPLAKFKPVRGVCQGCPLSSYLFVLCMEWLGHLIQFAILEGKWSPIXLNRNGPAISHLFFVDDLVIFSKAMVXVLKNILDNFCELSGHKINSRKTNIFFSKGVDDTMVNSISSLFGFQRVHNLGHYIVVPLFH

SEQ ID NO: 109331 - protein, 114 aa, Gossypium hirsutum
  Clone ID: LIB3828-027-Q6-K6-H12.pep
KIHLKFLLFFSPFYFSQTLSPLTRLPLFFHQFPQIGSPLHLCLYPAAISLATSAIKYIEKGPKARVIFQQLISGVSYCHAMVYILMLKIVSHFLPIISYLIRNFSPLFYIENLS

SEQ ID NO: 109332 - protein, 169 aa, Gossypium hirsutum
  Clone ID: LIB3828-028-Q6-K6-A8.pep
MAFPSFLFLLILLPLFFSQLSPDYYRQFCPNLDNIIRDVVTTKQISNPTTAAGTLRLFFHDCMIGGCDASVLISSNSFNKAERDADINLSLPGDAFDVIVRAKTAVELSCPGIVSCADILALATRNAITMVGGPFYTVNLGRKDSLVSTQSSVEGHMPLANMTMDEIIK

SEQ ID NO: 109333 - protein, 56 aa, Gossypium hirsutum
  Clone ID: LIB3828-028-Q6-K6-B4.pep
KSKKQMKGSLYETYSLKVQHFTANTNFVKKKKRTKKKTIICPTLPCSFVIISFEIS

SEQ ID NO: 109334 - protein, 59 aa, Gossypium hirsutum
  Clone ID: LIB3828-028-Q6-K6-C6.pep
LASILLFRKLQNVRHKEFLMVQGTIAYEKNKDPHIHALAVKLPDNIRLLLCDQRIVYKI

SEQ ID NO: 109335 - protein, 49 aa, Gossypium hirsutum
  unsure (1)..(49): unsure at all Xaa locations
  Clone ID: LIB3828-028-Q6-K6-D11.pep
CVPLXRTSPTTSTSSPLKPHWNRSLGADHFILACHDWVTLPFVSFMILG

SEQ ID NO: 109336 - protein, 69 aa, Gossypium hirsutum
  Clone ID: LIB3828-028-Q6-K6-E12.pep
YLDGSCTAFTFYFTRKRNVLAGDLPASHKLWPPVPSGLGRNLATSKRERVRVSSSSSQVCQPDKIGIRG

SEQ ID NO: 109337 - protein, 104 aa, Gossypium hirsutum
  unsure (1)..(104): unsure at all Xaa locations
  Clone ID: LIB3828-028-Q6-K6-G6.pep
LVALCLQLMESQYXKQPAANFYELAFTAWLNKDVIIHGYMWLAVYSLVMGLICLWNPDFLSTDEFLEQPFSLTSAESSIFLCYGVTNMETVRRYHHSXFLSMAI

SEQ ID NO: 109338 - protein, 75 aa, Gossypium hirsutum
  Clone ID: LIB3828-028-Q6-K6-G9.pep
MAVMVRIIESAISKPPYKVAWAVLPEVVHHLAGNLCATKISMAAIKSPKDSEVKYRANRLDARRGRQLWSVCQSA

SEQ ID NO: 109339 - protein, 190 aa, Gossypium hirsutum
  unsure (1)..(190): unsure at all Xaa locations
  Clone ID: LIB3828-028-Q6-K6-H1.pep
WAFAVGGIAWKXGRNRXGTLPIPGPRGFPVFGSLFTLSRGLAHRSLAAMAWSRANTQLMAFSLGSTPVVVASDPHTAREILTSPHFADRPIKQSAKSLMFSRAIGFAPNGTHWRLLRRIASSHLFAPKRILAHEPGRQLDCTVMLRNIANEQKLHGSVCLRKHLQFAALNNIMXSVFGRRYDQRKDSEEL

SEQ ID NO: 109340 - protein, 198 aa, Gossypium hirsutum
  Clone ID: LIB3828-028-Q6-K6-H7.pep
PALLNSILDSVKGCLDFKGRPVHRSSSGGWTSASFIIAVEVAERFAYYGISSNLITYLTGPLGLSTAAAAAQVNAWSGVATLLPLLGAFLADSFLGRYRTIILASLVYILGLGLLTLSATLPSVTTSGAPNADSVTLNTSSMLQYQVILFFFSLYLVAFGQGGHKPCVQAFGADQFDAEHPVECKAKSSFFNWWYFSI

SEQ ID NO: 109341 - protein, 192 aa, Gossypium hirsutum
  Clone ID: LIB3828-029-Q6-K6-A12.pep
PLVILLSFTFFSTTLYANSHSQQHFDTGGLSRESFPEGFLFGTAASAYQVEGMASEDGRGPSIWDAFVKTPGHIANNETGEFSIDQYHRYKEDVDLMQMLNFDAYRFSISWSRIFSNGIGEVNWKGVDYYNRLIDYLLEKGITPHANLYHYDLPLALQEKYLGLLDRQVIQDFADYAEFCFKTFGDRVKTWM

SEQ ID NO: 109342 - protein, 196 aa, Gossypium hirsutum
  unsure (1)..(196): unsure at all Xaa locations
  Clone ID: LIB3828-029-Q6-K6-A2.pep
HFSXKHLWIMTIRAFRKEDSFCQENVDRVNSNLRMDFHNNGSNEWLGFRLELIGTVVLCLSTMCMILLPSSIVRPENVGLSLSYGLSLNGVLFWAIFLSCFVENRMVSVERIKQFSSIQPEAAWHIEDRLPPPNWPTHGNVELKDLQVRYRPNTPLVLKGITLSIKGGEKIGVVGRTGSGKSTLIQVLFRLVEPTA

SEQ ID NO: 109343 - protein, 158 aa, Gossypium hirsutum
  Clone ID: LIB3828-029-Q6-K6-A4.pep
LKLSLFRNSFKFRSTCGICLNSVKTGQGTAIYTAECSHAFHFPCIAAHVRKYDSLVCPVCNTTWKDVPLLSIHKIPRSINQPKPKPDLRSYDDDEPLLSPTAGGGRFVPIPEADEHEEEIGGDVEEFQGFFVNPNPSSIEVHPFNGRDSRNVQVRLSP

SEQ ID NO: 109344 - protein, 162 aa, Gossypium hirsutum
  Clone ID: LIB3828-029-Q6-K6-A6.pep
FGSLMKCLIVNAKLCFFYMYITTQSITLESPLKINIFLQNILWLISISNYFVHKEENGAPTPCFFGNSFIKSIVNALYLIRSSFIFITCCFIIYFCCVSYYSLDRKPNEVEDNFLTHFCCFVDFQSFKESNLIKLKFHLKFHLITYYISVMFYCNSKVYCFQ

SEQ ID NO: 109345 - protein, 171 aa, Gossypium hirsutum
  unsure (1)..(171): unsure at all Xaa locations
  Clone ID: LIB3828-029-Q6-K6-B3.pep
TFRKGILSIAAIPDIIGWLAISFAKDSSFLYMGRLLXEGFGVGIISYTAPVYIADIAPHNLRGSLCSVNHLSDTLXNNAGLISLDLFAMWGILTGIGILPCPISIPGLFIIPESPLCLAXMWMTQDQKTSMXVLTLFYPDIAIGVNQIKRSVPSTTIRTTIEIANLKQRRY

SEQ ID NO: 109346 - protein, 38 aa, Gossypium hirsutum
  Clone ID: LIB3828-029-Q6-K6-B4.pep
KYNLSWLYLFMSADIDEARNIDACLFKTCCFQKSELKI

SEQ ID NO: 109347 - protein, 37 aa, Gossypium hirsutum
  Clone ID: LIB3828-029-Q6-K6-B7.pep
KKNQLSFPALERNNENEVKSKLYFGYCCQPMDGPHSG

SEQ ID NO: 109348 - protein, 144 aa, Gossypium hirsutum
  unsure (1)..(144): unsure at all Xaa locations
  Clone ID: LIB3828-029-Q6-K6-C12.pep
MDSLSSVSPSIVLPPTNTLPTRRRHRPQVVAFSFTTNTRLPRLSSFFGVKLKGRLNRVVDCKCKFNGGDARRGEEDDHGGNDDDVDGEKDEVERALHLDGTIPSTSSEFLRRVSSRAYDMRRXLQQSFDSSSYDVLEANPWRDP

SEQ ID NO: 109349 - protein, 72 aa, Gossypium hirsutum
  Clone ID: LIB3828-029-Q6-K6-C3.pep
SSYSALASISVTAKIGVIGKCKCKRFYHQCWYSESGMFSSNHQQDLKLPLMVNHTCELQIFIYSYRVPEDSS

SEQ ID NO: 109350 - protein, 166 aa, Gossypium hirsutum
  unsure (1)..(166): unsure at all Xaa locations
  Clone ID: LIB3828-029-Q6-K6-C5.pep
MKRRRLNVINGRDKIDEVYXNGETKLAVMERALDIQANLSSEFPSMIKYMLPSHVTGGFWLGLPKHFCLNHLPKEDRMMVLEDEEGKEFQVKYLVEKIGLSGGWRAFSIAHKLLEGDVCVFHLVRPSKFKVYIVRKKCSEEVDVALGLLKLESSTQLVDNERTKDM

SEQ ID NO: 109351 - protein, 64 aa, Gossypium hirsutum
  Clone ID: LIB3828-029-Q6-K6-C6.pep
ADLYYFFFFFFFFFFFFFFFFFFFFSFFFCFFFFVFFFFFFFFFLLLRLKDITFRLQWLIKTFF

SEQ ID NO: 109352 - protein, 200 aa, Gossypium hirsutum
  unsure (1)..(200): unsure at all Xaa locations
  Clone ID: LIB3828-029-Q6-K6-D1.pep
RPRGRPRGFNTLSFLNFYFNNVFFRKERETHVYLAKLAEQAERYEEWWRVXEKVAKLDCELTVEERNLLSVGYKNVIGARRASWRIMSSIEQKEESKGNEENVKLIKGYRRKVEEELSNICTDILSTIDKHLIPSSSSGEATVFYYKMKGDYYRYVAEFKTDQERKEAAEQSLKGYEAASAAANTDLPSTHPIRLGLALN

SEQ ID NO: 109353 - protein, 199 aa, Gossypium hirsutum
  unsure (1)..(199): unsure at all Xaa locations
  Clone ID: LIB3828-029-Q6-K6-D4.pep
ARVSVCKXPGGQAMSDIVNNRSFWNSCMLIARITYPLLRVXRIVGSKKRSAMGYVYAGIYRAKETIKKELVKQDDYMVYWNIIDNRWEQQRHLPLYAAGFFLNPKLFYNTEEHIHNDILSSVFDSIERLVPDTNIQDQVVREINLYKSATGDLGRPMAVRARDNLLPGEWWSIYGGGCPNLQRLAIRILSQTCSSIGYK

SEQ ID NO: 109354 - protein, 73 aa, Gossypium hirsutum
  Clone ID: LIB3828-029-Q6-K6-E12.pep
DELTSSQISHYIVRIKQTQAISHQHKLWSNSPQGLIQLPQSAFDKQEFQPPRFILGKSNAKKGTKAHKASTSH

SEQ ID NO: 109355 - protein, 202 aa, Gossypium hirsutum
  Clone ID: LIB3828-029-Q6-K6-F1.pep
ENMSGNSKGNKREKPTPQHEQALKCPRCDSINTKFCYYNNYSLSQTRYFCMACMRYWPKGGALRNVPVGGGCRKNKRSSSSSSSSSSSKRSQDQPLLTYNTNPLIAGHLPPLNYDTNDLSLDFARLQKQSGLPFRVDDFGNPNLNGCTRNTSPPNPAIVDALKNTFLGNQNSLQNFYYGFGNENMGEAVDMEDNGELMVPYH

SEQ ID NO: 109356 - protein, 71 aa, Gossypium hirsutum
  unsure (1)..(71): unsure at all Xaa locations
  Clone ID: LIB3828-029-Q6-K6-G3.pep
VSXKISHHQTCIPRSASELEGHRPPLLFRLFIFTVNEFTSFTTPCQICLVPCTERSTLSSMQPLVFLSVFF

SEQ ID NO: 109357 - protein, 159 aa, Gossypium hirsutum
  unsure (1)..(159): unsure at all Xaa locations
  Clone ID: LIB3828-029-Q6-K6-G9.pep
RKSAHPHSLSLFPYAAAPKLPFSLCKIHRLHSPTLGNARIPGAFYTGSRETAHATFNGGSAAPGTMGGACGXGNLNRQGYGVNTADLSTALFNNGLSCAACSEIKCTSDPRWXHPVSPSILDTATNFCPTNLALLSDNGGXWCNPPRPHYRSRPWPMFL

SEQ ID NO: 109358 - protein, 66 aa, Gossypium hirsutum
  Clone ID: LIB3828-030-Q6-K6-A12.pep
LYMALYIASAIISMPIALLFVLIIHTMTEEGDAAGEATLTILLVTLGKTERKMGQKRVKHMGNHRV

SEQ ID NO: 109359 - protein, 165 aa, Gossypium hirsutum
  Clone ID: LIB3828-030-Q6-K6-A2.pep
SQRKEDGEEKGKPDDSENHKEVKSEKDKTQNLVMPPPPPTWKDGFRGEECDPSNMCMDKNKRFAACLRVPGNESPDLSLLIQNKGKGALAIKISAPAFVRLEKTDVQIQEKQDGKVKVSIEGSGIGNMIVLKDGKGECSLDFKGVDRSQFRNVLRKLLVTNPYNC

SEQ ID NO: 109360 - protein, 173 aa, Gossypium hirsutum
  Clone ID: LIB3828-030-Q6-K6-B8.pep
MGENHHQAAATSSRLRIKHVGGEIVEVQGGHIVRSTGRKDRHSKVCTAKGPRDRRVRLSAHTAIQFYDVQDRLGYDRPSKAVDWLIKKAKSAIDELAELPPWNPLDATISTKKPNNQEDLNTSTATNNEFHIENLAAGSGSQCVQQHEMGDNLNNNSGFLPASLVSDEIADTM

SEQ ID NO: 109361 - protein, 51 aa, Gossypium hirsutum
  Clone ID: LIB3828-030-Q6-K6-C4.pep
RVRNRQTSMADSRSYDSVTGGATVHHNTDAFLAMATSQLPQMTRYEPKTQG

SEQ ID NO: 109362 - protein, 179 aa, Gossypium hirsutum
  Clone ID: LIB3828-030-Q6-K6-C9.pep
THPKARRSIPLLRQLWTLPSFNLTPTRSVTYMPRPGDGAPRAVTLIPGDGIGPLVTGAVEQVMEAMHAPLYFERYEVHGDMERVPEEVIQSIKKNKVCLKGGLATPMGGGVSSLNVQLRRELDLYASLVNCFNLPGLPTRHQDVDIVVIRENTEGEYSGLEHEVVPGVVESLKLITKFC

SEQ ID NO: 109363 - protein, 63 aa, Gossypium hirsutum
  Clone ID: LIB3828-030-Q6-K6-E5.pep
CVTWLRIQVGVDISSSRHTVSAQPCKIGLLPRAGNQVLGMVNHSDTLAMFLKEHAYACHAFTR

SEQ ID NO: 109364 - protein, 74 aa, Gossypium hirsutum
  Clone ID: LIB3828-030-Q6-K6-F5.pep
KEEVVVCCLDFSSMIKVNNIFKFGMNMISMFQACKIQMFPLCKWRSHGVQVANYIMSIVLKRWHAIIDVVGAMI

SEQ ID NO: 109365 - protein, 172 aa, Gossypium hirsutum
  unsure (1)..(172): unsure at all Xaa locations
  Clone ID: LIB3828-030-Q6-K6-G12.pep
PALASAAAVHATIARSLAGVPELVPXFIRWLMGLLHGIITAQMTPRLDLPLTLPAMPDATPAPTAAPKTACAPSSSPSAINSDLNGHSDGQYFHESFQESQLTHQFKLXKKSQTHSLDLSSDMMSTXKNTSHNMNHDLNEQLPLQDPMETKMDTAAGDLTDALVDPKHTITH

SEQ ID NO: 109366 - protein, 73 aa, Gossypium hirsutum
  Clone ID: LIB3828-030-Q6-K6-G9.pep
FNFGGPKKKVIRCNHGDVKLDPFKTDPPRFFFFFFFFFFFFFFFFFFFFFFFFFFFFFFFDTHIFIEFYILVL

SEQ ID NO: 109367 - protein, 119 aa, Gossypium hirsutum
  unsure (1)..(119): unsure at all Xaa locations
  Clone ID: LIB3828-030-Q6-K6-H9.pep
CLCTIDIFLNTXKWIEEVRTERGTDVIIVLVGNKTDLVDKRQVSIEEGDSKARELGVMFIETSAKAGFNIKPLFRKIAAALPGTGSLSSTKQDDMVDVNLKSSGNSYQNPDQQGGGCAC

SEQ ID NO: 109368 - protein, 173 aa, Gossypium hirsutum
  Clone ID: LIB3828-031-Q6-K6-A6.pep
FVFSDLAEFKHDEPDCINKDHPSICTESEEVNGLCNVNSESLDSDKFVQESPAANMENSIEKSGIISDPISIFGNHGVVGEKDGLQVESLPIMQSPIAKLDSSNNNPVSHCLDSSSEAIRWKSIRKDDSNEIRSNADEEQQLAHESSSREESETSGKLKNIIHISAVEISFCK

SEQ ID NO: 109369 - protein, 174 aa, Gossypium hirsutum
  Clone ID: LIB3828-031-Q6-K6-B9.pep
FCLTLKRDGEGGNEIKASLGWRVVYAWVGDDPCGDGNLPPWSGITCTLMGDYRVVTELEGDAVSIVGPFPVPVTNLFDLTRLDMHNNKLTGPIPPQIERLKRLKILNLRWNKLQDVLPSEIGELKSLTHLYLSFNNFKGEIPKELASLPELRYLHLHQNRFSGRIPAELGTLEK

SEQ ID NO: 109370 - protein, 96 aa, Gossypium hirsutum
  Clone ID: LIB3828-031-Q6-K6-E4.pep
CFNFMSEQSQNCLKYSALILNTFLSSYKHQATAKLSSDKFTTNSLHHTPTFTALKAHPFLAETNILRLPYGKRTPHASNGSTRNKLTQSCTIAIAA

SEQ ID NO: 109371 - protein, 76 aa, Gossypium hirsutum
  unsure (1)..(76): unsure at all Xaa locations
  Clone ID: LIB3828-031-Q6-K6-F5.pep
GSTSXPRTLGLDCPRDLGPWLSDQDADCYANQFQETGITGALNYYRNIDTYVFLPATSHLIFLFAGVVMKSYKMII

SEQ ID NO: 109372 - protein, 159 aa, Gossypium hirsutum
  Clone ID: LIB3828-031-Q6-K6-F7.pep
ADGKMQQWFREGVAGPMLSSGMCTEVFQFDASAPGAIVPASSVTPESAKSRQNATQLNKGRNRRILHGHPVPLSRSDLNITQEHVGRNSGKQNFQGNKTASSMVVSVLIDPREAGDGDMDDMIVPKSLSRIFVVVLLDSVKYVTYSCGLPRSGLHLVTA

SEQ ID NO: 109373 - protein, 85 aa, Gossypium hirsutum
  Clone ID: LIB3828-031-Q6-K6-F9.pep
KKSNLRKVKFVGKRFFFEVFFFLKKRFFNTPPPVKKKIFFYIIVFYFYFFFILFFFFFFFFFFFFFFFFFFFFFFFFFNLTTHTF

SEQ ID NO: 109374 - protein, 175 aa, Gossypium hirsutum
  Clone ID: LIB3828-031-Q6-K6-G8.pep
FWSTSACGGNGCLHFRELIEGGIVPFKDENFTKDGTLDTPVNGVPGMSSMRLKDFPTLIGGTNQNDIMLNFMSEEAQNCLKSSAIILNTFDELEHEVLQAIAAKSTNLYTIGPLSLLEKLTLLSRDRYFRSSLWKEDSKCLEWLDKRQANSVLFVSYGSITVMTDQLFEEFAWGL

SEQ ID NO: 109375 - protein, 176 aa, Gossypium hirsutum
  Clone ID: LIB3828-031-Q6-K6-H6.pep
SSFLSGNSKASIILVIDDLPVTNGRSAFERLQRCLVLLVRSTRVPTAILVTDYGNAYSSGVTARWLEELQLTLESAGASKVAFNPITNNSIKKTLSRICRQELCNVAAEEIDLIARASGGDIRHAITSLQLFCLKPNVELDLSSSNSTPSCPKENANVLNKFSGGFSSQYGRYETL

SEQ ID NO: 109376 - protein, 44 aa, Gossypium hirsutum
  Clone ID: LIB3828-032-Q6-K6-B7.pep
LSYLGTGVNVRYGYVQFFCFRSSMYLKSLYRTMSLYLYPDMRLT

SEQ ID NO: 109377 - protein, 171 aa, Gossypium hirsutum
  Clone ID: LIB3828-032-Q6-K6-B8.pep
ESLNVEPIADLDLFFERLYSYYCEKGLWCIIIKWIVELLSVGFTICFSGFFLLFVDWNGLHNAKCGMDAVESGTKPCDLAKEALQEHPLTPLTLSKAIVVGYLVLFSVYWVFCFLRFFAQLKDTLGMQHFFYNSLHITDSEIQTMPWATILERVVRLQSSSQLCVVKDLST

SEQ ID NO: 109378 - protein, 175 aa, Gossypium hirsutum
  Clone ID: LIB3828-032-Q6-K6-E9.pep
DAWADAWVEKYDYAWNIGSNGARRPNDILRKLDKHVSNKRHLPIKIKSNKQVNGRCRRHLDHRGGGGDITYICGAATSDGAPCERPVSGNGRCWQHSNYGRSSSSNKRHVPVKIKSNKQVNGRCRRHLNYGGDGGSSFTSRNLNYGCYDSSFTPRWLDHGGDDIILICGATTDNG

SEQ ID NO: 109379 - protein, 175 aa, Gossypium hirsutum
  Clone ID: LIB3828-032-Q6-K6-G6.pep
AASAATISPTTAHAANTIRRAFHSNPFNSLSSFHHSILCARFRCLSLRSFTAVSTKAMSHPQTLDAPHPQSSAAGNKQALISLSDKKDLALLGSGLQELGYTIVSTGGTASALENAGVSVTKVEQLTCFPEMLDGRVKTLHPNIHGGILARRDQKHHMEALNKYGIGTFDVVVVN

SEQ ID NO: 109380 - protein, 106 aa, Gossypium hirsutum
  unsure (1)..(106): unsure at all Xaa locations
  Clone ID: LIB3828-033-Q6-K6-A4.pep
IKRWCSVAKGSVKRAYKVYSSSQVSASIEVRQLLIFVITNNEIVDHICRLAGLVKRLEKTGYLIADGEEDNLAIVVAAVGVXMLTAQVFKRDFVEYGSLERLTLYL

SEQ ID NO: 109381 - protein, 65 aa, Gossypium hirsutum
  Clone ID: LIB3828-033-Q6-K6-A9.pep
LTLRSTLRGGRRVPIKTSACQARTTATWSGFLHAIASAAKTDGTPLSIADQNKKIPPSEAGGATP

SEQ ID NO: 109382 - protein, 177 aa, Gossypium hirsutum
  Clone ID: LIB3828-033-Q6-K6-B7.pep
APLSPPTPPGKGGGIHLEASPSLEENLRATTPATPIPPPPPSPAPIRAGSPVTPPPSPPRGGPLLKVNSASKSAPPPPPPPPLHARQVASSVPPPPPPPTPALASKSQVPAAPPPPAPFGKKTNGNFPEPQAVGSSGSSAPGRPSFTSPTNSKNRLLSRTISSKSHQTKKLKPLHWL

SEQ ID NO: 109383 - protein, 74 aa, Gossypium hirsutum
  unsure (1)..(74): unsure at all Xaa locations
  Clone ID: LIB3828-033-Q6-K6-B8.pep
KWGGGGPXXLKSKKKKETKPGELAKEALARAPXNSLNTFNSYSGLERGGGGPSLGRPALGGGLPFLGRPPVSNI

SEQ ID NO: 109384 - protein, 61 aa, Gossypium hirsutum
  Clone ID: LIB3828-033-Q6-K6-C6.pep
SMNSTSFASILVQANRLSFIILGTCHYNFSTYVTVMNSGSSRDADSPYYVSLTCARVHTER

SEQ ID NO: 109385 - protein, 164 aa, Gossypium hirsutum
  unsure (1)..(164): unsure at all Xaa locations
  Clone ID: LIB3828-033-Q6-K6-E9.pep
CGISKKLPELNDLIFYLLLQSSGWAPYICCLPQHGEIHSTIFWSEYELNMICQSXYQETVNQKAKIEKDFAAVVPALQQFPDLESITLQDFMCAYFSVTSRAWESTKGLSLIPFTDFMNHDGGSKSIVLFDDDKMFSEVIADRNYAPGEEVLINYGKFPNAMLL

SEQ ID NO: 109386 - protein, 75 aa, Gossypium hirsutum
  Clone ID: LIB3828-033-Q6-K6-G8.pep
GFSILGVSILRPRRLTKKKRKEKMHAKVAQSSFRDRTQEFQSVADRLRKSISSGQGQNGPSSSTSRAEEKRSMVA

SEQ ID NO: 109387 - protein, 87 aa, Gossypium hirsutum
  Clone ID: LIB3828-034-Q6-K6-C4.pep
VDWCVGEVRKLAAGGGHSAVLTDACSLKELCEFRLAECVTLSNAARIGDVASRTGADALARLCERLREHHLHGGGFDDQDDISNMKS

SEQ ID NO: 109388 - protein, 50 aa, Gossypium hirsutum
  Clone ID: LIB3828-034-Q6-K6-C6.pep
FLHFCFDEEILQDLDFRELVLLTLKKDQLFIKVNFICHVKEQHAKDTCIQ

SEQ ID NO: 109389 - protein, 55 aa, Gossypium hirsutum
  Clone ID: LIB3828-034-Q6-K6-E5.pep
SYKILKNSVSGPDNLPISDVVCIRAFLDLSVKFFSYHCKVNYELYPSTTCIQWVF

SEQ ID NO: 109390 - protein, 118 aa, Gossypium hirsutum
  Clone ID: LIB3829-017-Q6-K6-A5.pep
MGSMMPNFMEGHISSKEKIDIEMGNRLAEDTGYSLPEILRNLEFDDFEDELMIKQEGERDMDSLFLGGQDMKPSDEVSIPGGETVRTEQSSASKNGDGEFMESYSARNETDTSGKPIM

SEQ ID NO: 109391 - protein, 105 aa, Gossypium hirsutum
  Clone ID: LIB3829-017-Q6-K6-A7.pep
SVTTLICGAKELKKLVNLSGQLDKIKHVICMDDEIPTAASGRWAVTSFADVQRTGYENPVDADLPIAADVAVIMYTSGSTGLPKGVMLTHGNILATVAAVRTFIP

SEQ ID NO: 109392 - protein, 176 aa, Gossypium hirsutum
  Clone ID: LIB3829-017-Q6-K6-B3.pep
MSARLLKKVLKEQEQKKQHVIEEDEQDELLNDDESVSPDSGAGSSKNPFDLLNEGDDADEDNADQVYADETSTRKQEPPPSVKNALNSAYTSNNKSKKKKQKKGKEGSLSTGKRETPLDVNLEALALDIESSSQQSGLNKQPGFENFKQSKPSVLHVDPKYLNVENELRRIFGSKV

SEQ ID NO: 109393 - protein, 169 aa, Gossypium hirsutum
  unsure (1)..(169): unsure at all Xaa locations
  Clone ID: LIB3829-017-Q6-K6-D10.pep
EVYPGEVLVVDKXRGVQSVCLMPHPEPKQCIFEHIYFALPNSVVFGRSVYESRHAFGEILATEAPVDCDVVIAVPDSGVVAALGYAGKAGVPFQQGLIRSHYVGRTFIEPSQKIRDFGVKLKLSPVRGVLEGKRIVVVDDSIVRGTTSSKIXRLIKEAGAKEVHMRIAS

SEQ ID NO: 109394 - protein, 144 aa, Gossypium hirsutum
  unsure (1)..(144): unsure at all Xaa locations
  Clone ID: LIB3829-017-Q6-K6-D5.pep
MGAFSTLGFPDFPGAREHAVQCWVPGYNGDLLSLNVVNENVSDKNHDFYSTKHNEDFAGLEQHIEDLTQEKFSLXRALVASRTIAESIAAEKSSLTDCCYQQRSVVYQLKSDLVKLQEEXQAQLAELESFKMEFTYARLVCNAA

SEQ ID NO: 109395 - protein, 103 aa, Gossypium hirsutum
  unsure (1)..(103): unsure at all Xaa locations
  Clone ID: LIB3829-017-Q6-K6-E2.pep
MSCALMDCVGCEKWALWGKLQDLGLGTALNILFSVNGEDHSPHTLNMQRLEXIALINLLNLLXPSIKFVHEMGAALVKLNVGTATYTTFNRLVQHVWASIVKT

SEQ ID NO: 109396 - protein, 65 aa, Gossypium hirsutum
  Clone ID: LIB3829-017-Q6-K6-F7.pep
NPLKEEKRGAPPAHAYGHWACTRTHADVHGRWKAKSLHFSWLIECNAFFLLNINNFFCTNDSYTR

SEQ ID NO: 109397 - protein, 203 aa, Gossypium hirsutum
  Clone ID: LIB3829-017-Q6-K6-F8.pep
VRAASPYYYLHNVLPILIKHSVVELVVSDGGCLQAILPSDLEEYQSLRCRVAFHALRFRQDVQDLATNILHRLRAPGRPFIAFDPGMTRDALAYHGCSELFQDVHAELIQHRRAWMRKRGIIKGQLSVNSAKQRLKGSCPLTPEEVGILLRAYGYSWDTIIYVSGGEVFGGQRTLIPLHGLFENVVDRTSLSTSWELSRIYGR

SEQ ID NO: 109398 - protein, 84 aa, Gossypium hirsutum
  unsure (1)..(84): unsure at all Xaa locations
  Clone ID: LIB3829-017-Q6-K6-G4.pep
MRNQYSCAKTTHFCGAVANGRLLVDGSEDMNKPIETMIWLTCTSAMSVYTVLFNMFVCMVQPXNYILMACHAGNQTAQMYQLSH

SEQ ID NO: 109399 - protein, 109 aa, Gossypium hirsutum
  Clone ID: LIB3829-018-Q6-K6-B6.pep
QFNPQSSCFSIPPGLGHGGQAPGLNSVTSASLQQQPNSIHQQSGQQALATSVPKDADVGVAKVEEQLQSLPDGSSSEAIPTSGLAKDLMNEDDLNAPYAVDSAAAAIGF

SEQ ID NO: 109400 - protein, 52 aa, Gossypium hirsutum
  Clone ID: LIB3829-018-Q6-K6-C10.pep
GCTNYPLWKTFQELYFAYYIVRVTLIKFSGCLNNGAVMVPLMKLGYSFFRLM

SEQ ID NO: 109401 - protein, 201 aa, Gossypium hirsutum
  unsure (1)..(201): unsure at all Xaa locations
  Clone ID: LIB3829-018-Q6-K6-C7.pep
NHWHVIMARKYREQSSAYRRRKLSQSVYRKMEETPNIVCRDAGTKAEPAPYCLNISDRRLGIISHYQFGIFNGGDAGGVNGGSNVSPHMTSEREAILSSEAPYRNGFCAQAQPPPFDFFPDLSNDMMGMFSQTRFWDRPIDETQVRGYYPQRQHQQLHPSHMMTMQQSEXLSFQSNTDSTASITPQVSAIEPSSFVAGSSN

SEQ ID NO: 109402 - protein, 109 aa, Gossypium hirsutum
  unsure (1)..(109): unsure at all Xaa locations
  Clone ID: LIB3829-018-Q6-K6-D1.pep
MVNSMVERATSDLLIGPDWARNIEICDMLNHDPGQAKDVVKGIKKKLGSKNPKVQLLALTLLETIIKNCGDIVHMHAAERDVLHEMVXIVKKKPDFHVKEKIIVLLDTW

SEQ ID NO: 109403 - protein, 193 aa, Gossypium hirsutum
  Clone ID: LIB3829-018-Q6-K6-G12.pep
RSARFTSVSTNVNPAAASFRNDLIHGANNNGMHQFSSGFRPEFGGLELVDNLNSNGQKPRLQLWLDEANSQVNPFGIPSNANAFLAPKSTSFPDLGMAPMNMFGSLTTQWLGKYPEDASFAGANLNMSALRHGPKQEEENKGDLSESITSLYSNNSLQQQNYTHMSATALLQKAAQMGSTRNNPAINNSGFGL

SEQ ID NO: 109404 - protein, 58 aa, Gossypium hirsutum
  Clone ID: LIB3829-018-Q6-K6-H12.pep
RGNEAHYSIREQANSFIRQTQSRAHIFLFEIQNGSRYISAYHHATIIDLAKKLREKIP

SEQ ID NO: 109405 - protein, 94 aa, Gossypium hirsutum
  unsure (1)..(94): unsure at all Xaa locations
  Clone ID: LIB3829-018-Q6-K6-H6.pep
MKWGDLSLYARDCDNGRVDPKDCAGVILCAAERATQVALQAIQCLCGNGYVNEYTTGRLLLDAKLYEIGAXGTSEIRRMVIGRELQKEELESKL

SEQ ID NO: 109406 - protein, 60 aa, Gossypium hirsutum
  Clone ID: LIB3829-018-Q6-K6-H7.pep
NSKPNFFFPPQRFKNIFFFFPRTGRPFFFFFFFFFFFFFFFFFFFFFFSLFFFFFFFLRD

SEQ ID NO: 109407 - protein, 126 aa, Gossypium hirsutum
  Clone ID: LIB3829-019-Q6-K6-A10.pep
KGELSGEFSVRSAYKLLHNASLDLRNFLIQTEMKEFYKKLWGLQLPPKIIIIIWRISWDFIPNFVNLRFKRIISDDRCPRCCSWEEYNLHIFHDCPGFSREVTMPNVDVSVMPYGRNGGLFRRSVR

SEQ ID NO: 109408 - protein, 58 aa, Gossypium hirsutum
  Clone ID: LIB3829-019-Q6-K6-A11.pep
SPGFEILCCACKLLDEDTGSMHLFYMNGRLTKPALNQRDKSTVKRIKCLEDETISKHT

SEQ ID NO: 109409 - protein, 163 aa, Gossypium hirsutum
  Clone ID: LIB3829-019-Q6-K6-A6.pep
WSEAAEVFRSPARSGSRNQVVGRSPTRKIDQSPGRRNGVVNGGSASVRLVHSREPTVRRGSRPDPTRKDPGESSGRRSRSPAVNRSVMGRSPSGRRTNQSPGRARLDPGETGNSKKVEQQHGATTTTTMEGKWPSSNNNAATSSAPNESLENPLVSLECFIFL

SEQ ID NO: 109410 - protein, 70 aa, Gossypium hirsutum
  Clone ID: LIB3829-019-Q6-K6-C4.pep
SHGSSSVRSHLWFEGVDWKGIRDRTCPVPQELASRVAQHLEIHSEDCPVAVASPPQDIAELNVPEWLDDW

SEQ ID NO: 109411 - protein, 182 aa, Gossypium hirsutum
  Clone ID: LIB3829-019-Q6-K6-C5.pep
MGHHSCCNKQKVKRGLWSPEEDEKLINYITTYGHGCWSSVPKLAGLQRCGKSCRLRWINYLRPDLKRGSFSPQEAALIIELHSILGNRWAQIAKHLPGRTDNEVKNFWNSSIKKKLISHDHVPALASFADVHSSNHTEEAGFISLNANPNLILTAQQDQLYLSPTAPVLQSFGHHADLVHHH

SEQ ID NO: 109412 - protein, 120 aa, Gossypium hirsutum
  Clone ID: LIB3829-019-Q6-K6-C8.pep
YQSLGDPWAWLSRILLILTLLSQVARCSPVVGSSPPFLDMMLSSLTRLRLFSGNSRYALSLLAMLAAPARFVQASDGTLVANPTASIFTQQDNLLTSWLLSTISSSFLSSFTDVRFACDV

SEQ ID NO: 109413 - protein, 77 aa, Gossypium hirsutum
  Clone ID: LIB3829-019-Q6-K6-C9.pep
LTRRRLPPIRSHMFLPLILLPWVAGAAVIHEKKPLNYRCHFGTYWTIPVVCLHSLYVAVLMGFTRAIRHIEFRFHEL

SEQ ID NO: 109414 - protein, 165 aa, Gossypium hirsutum
  Clone ID: LIB3829-019-Q6-K6-D2.pep
MNIGSMDSSSGPNNSLAFSLSSHHHHQNHLSFFSSSSNPTLFQAFNTSAAAAVPTTTPPANSLSAEKDAGGEGPATTASATTDLSMFKGGPKLEDFLGGSSTTPGVGGAPQLQLLHHHNFSTQTPVTVSDNDIYDSELKTIAAIFLRGFSSEQIDIHKQQQQAPI

SEQ ID NO: 109415 - protein, 81 aa, Gossypium hirsutum
  Clone ID: LIB3829-019-Q6-K6-D7.pep
IVSIGWRRYQTTPVYAIEDQNGRHRMLKYTPEHMHCLAMFWGPLAPPKTGVLAVQNLSNNQVTLLNFMYFSCYHPYKIWNK

SEQ ID NO: 109416 - protein, 45 aa, Gossypium hirsutum
  unsure (1)..(45): unsure at all Xaa locations
  Clone ID: LIB3829-019-Q6-K6-E5.pep
TFTNQIMHEICSYFNSEVRDYVPIVTLXNKTILKNQFSLRYAQAA

SEQ ID NO: 109417 - protein, 202 aa, Gossypium hirsutum
  unsure (1)..(202): unsure at all Xaa locations
  Clone ID: LIB3829-019-Q6-K6-E9.pep
VDHYLXNKILDRDSLVQAIKEVDSLFNKDPWELPGWSKIQSADQVWYFFSRRGDNKRVKRTTDKGFWKVTGKPRKVKGKKGFAAKKSLVFYEGRTPNAKWTPWVIHEYTFTSTLVDNREGIFLCKLKKKEDETANASSSESCQPSLVADEEIPDYSTMFNPDEMLDTLKERDREHELEVDEQQQPSCLEFTHLQDVTTNCDG

SEQ ID NO: 109418 - protein, 200 aa, Gossypium hirsutum
  Clone ID: LIB3829-019-Q6-K6-F11.pep
RFKIRKNNRGWFSFRGEIRNSSQSAPLFVENKSESSEKIQPLPSRKSSSYVLPTPVATKGSVGLGKPARQSYKTSSYSSPLELHKYQRLLRDIKISGSAVINAQAVLRESNKPASSTQLPPPLADKVLLSRVSPAAASDSKKIKRQAFSGPLTSKQWPSKPVSVEHPQLFSGPILRNPMSQLQAASPKVSPNASPPFVSS

SEQ ID NO: 109419 - protein, 80 aa, Gossypium hirsutum
  Clone ID: LIB3829-019-Q6-K6-F3.pep
MQKMGLWTILEGFLLLANAMAILNEDRFLAPRGWSFSEFSTGQTKSFKGQLIGLIYATQYMRLPLILLNAICIVVMLISG

SEQ ID NO: 109420 - protein, 89 aa, Gossypium hirsutum
  Clone ID: LIB3829-019-Q6-K6-G3.pep
ARRAFLVGNKALAKQCSLCSCAAHRKARESIYCQRNQVSVSPENVRGKEHMIDLHGLHVSEAIHLLNHELSVLRSTARAADQHLQVYIC

SEQ ID NO: 109421 - protein, 198 aa, Gossypium hirsutum
  Clone ID: LIB3829-019-Q6-K6-G7.pep
RSSCDRTCSSFFGPTKTFPQHYGAFQGLAALGPSVVRLLILPNLEAYLQLLEPEIKRHEAWCVYGALLRSAGLCMYDRLKMFPSLLAPPTRPVWKSNNKVATNKRKASTDTLMQQQPPAKKIATESAIGMMPINSMQTDLQGAVSGFSTTVGGSNIGVSSMSRPLSNDNMLGREVGGRVSKTSTVLAQAWKEDTDPGN

SEQ ID NO: 109422 - protein, 123 aa, Gossypium hirsutum
  Clone ID: LIB3829-019-Q6-K6-H11.pep
KLVNSDNKVRQLEAQVSEAKQASANARKQVEELEHEIKGLRKHLETEKQATREEVWSKVFALELEINAAMRDLDYEKRRLKGARERIMLRETQLRAFYSTTEEIYILFAKQQEQLKPIQRTLE

SEQ ID NO: 109423 - protein, 79 aa, Gossypium hirsutum
  Clone ID: LIB3829-020-Q6-K6-A8.pep
STIPFKRKLPKRYCRFLLQKQTTKIFKCGKENFLENFLSEGPINYYNMLAWILIVIYYRSKSKTFTGNYRIYSYHKKLH

SEQ ID NO: 109424 - protein, 197 aa, Gossypium hirsutum
  Clone ID: LIB3829-020-Q6-K6-B12.pep
MAKQANFTFSNGKPVPFEDQVAVALRRLSSGQSLVTVGDSFGLHHSTVSQLTWRFVEAMEERGLHHLQWPTTEAEMTVIKSKFERILGLPNCCGVIDTTHVMMCLPSSDPASKVWLDHEKNHSMVLQAIVDPEMRFRDIVTGWPGKIKDWLVFQSSNFYKLCDKGDRLNGEKLELPEGSEIREYIIGDLGYPLLPYL

SEQ ID NO: 109425 - protein, 199 aa, Gossypium hirsutum
  Clone ID: LIB3829-020-Q6-K6-C11.pep
SIRHILTQYRSALPKHLHSYCAPILLEFCKLLRKVVNEDSLYEACRSALGMLLESVGTSRGLMLPEVKGLIVIQDIFPFVSELADKISKNLESSVDSTSSGEPLSSDVRDFTAFLNPLRSTILERVAFRIPISVKWKKKDNSNPPYGEAVEFLHTIFNDLLGKMENCLIRVEENLTATGSSEGEYLSSEWSQYLAILKD

SEQ ID NO: 109426 - protein, 70 aa, Gossypium hirsutum
  Clone ID: LIB3829-020-Q6-K6-D11.pep
DSGTPQNSLFYFFLQKKPTVAQSSDNVSKDQQQTNHAFQNGNKNSIFFLHSEFGTCKAVILPKSAIRLLP

SEQ ID NO: 109427 - protein, 193 aa, Gossypium hirsutum
  unsure (1)..(193): unsure at all Xaa locations
  Clone ID: LIB3829-020-Q6-K6-E10.pep
ELSHALLDESKIHGQTVVRICYLFAKLCSVLKITPGSIQSSDGKVLDGYANAFRSCSGNSVESLDGGIRIWTNSPRKVDCKDLVFXWGFRNRPSAGMLKSLLQGSIDVFSEEFDVCLVDKSCAIVVFFHPNLSQAFLDVMNSEEISGSLKELVSEGLRAADYDTYKRACSLGLWETDLASSLDKASATPDHLS

SEQ ID NO: 109428 - protein, 139 aa, Gossypium hirsutum
  Clone ID: LIB3829-020-Q6-K6-F11.pep
MHDDSQLPPPPPPPPVPGVGGGGIRPGSMTERARLAKIPQPESALKCPRCESTNTKFCYFNNYSLSQPRHFCKTCRRYWTRGGALRNVPVGGGCRRNKRSKGNNRSKSPSVVAERQHGSSSSSSTLVSNSCTDILTHMN

SEQ ID NO: 109429 - protein, 199 aa, Gossypium hirsutum
  Clone ID: LIB3829-020-Q6-K6-G8.pep
DKSLEDLRPHPNLKELFIGGWRGDAKFPSWLSLLTNLTVIRIWGPSNFKQIPSFAQLLCLQKLSIVDLTELEYMDDNSPKGSQGEPESFFPSLKSLCLENCPNMKSWWRKRSIDDDNEDDTTVIGTSMMVFPCLSSLEIVNCPLTSMPLYPSLDDDLRLVKSSSRPLKQTMKMNITSTTPSTSTSSLPLSKLKSFHVHK

SEQ ID NO: 109430 - protein, 201 aa, Gossypium hirsutum
  Clone ID: LIB3829-020-Q6-K6-H1.pep
HPAVYKVGLQYLSGDIRGGNARCIAMFQAFKEAIKDYSTPPEKTLIRDLTARISSYVSFLIECRPLSISMGNAIKFLKNRIAKLPLALSESEAKSTLMLDIDLFINEKIILSEKVIVKHAVTKIQDGDVLLTYGASSVVEMILLHAHELGKHFHVVVVDSRPKLEGQLLLRRLVRKGLSCTYTHVNAVSCIMQDVTRVFLG

SEQ ID NO: 109431 - protein, 71 aa, Gossypium hirsutum
  unsure (1)..(71): unsure at all Xaa locations
  Clone ID: LIB3829-021-Q6-K6-A9.pep
AFXAAFXXCSXCXXXAXLXIXXSNXHGXXRXXSFXPKXNXXRDXXHCTXSWXKLSKNNCXVGLXSIXXLIX

SEQ ID NO: 109432 - protein, 156 aa, Gossypium hirsutum
  unsure (1)..(156): unsure at all Xaa locations
  Clone ID: LIB3829-021-Q6-K6-E9.pep
KRSCQSSFNLIRDCKSLGQVNAIQHRCFSSASTLVQRNPSFSTLNSDDISYFKGLLGEKSVIQDEDRLETVNTDWMHKYKGSSKLLLLPRSTEEVAQILRYCNSRCLAVVPQGXNTGLVGGSVPVFDEVIVNVSSMTNIISFDKVSGILVCEAGCI

SEQ ID NO: 109433 - protein, 116 aa, Gossypium hirsutum
  Clone ID: LIB3829-021-Q6-K6-H10.pep
LVAWAGVPKTNARLPTCTLPVKDLTEVLSVALIDPAIKIRRLLNSGVPTITQGAADIPTPFTAKHNLSSSLYTLCLTDIFQEEDHGGASSEGTRRGTSNYTITIEPALTAAEVYTA

SEQ ID NO: 109434 - protein, 192 aa, Gossypium hirsutum
  Clone ID: LIB3829-022-Q6-K6-A12.pep
QRPWSVSSGRMANSIRQDLRSLRVFSVDPPGCKDIDDALHCTALPNGNYEVGVHIADVTNFVHPGTPLDGEASQRGTSVYLVERRIDMLPKPLTEDICSLRADVERLAFSVIWEMTPDAEIISTRFTKSVIKSCAALSYVEAQARMDDSRLMDPLTTDLRNMNALAKIMRQRRIDRGALTLASAEVKFQIDT

SEQ ID NO: 109435 - protein, 196 aa, Gossypium hirsutum
  Clone ID: LIB3829-022-Q6-K6-A8.pep
VLPASDLNEASNKANAFAVDLLRRTIVVVEDSLFNGASSFGYYYGSAKERLPPEIKDALTLYEERTGKALKPVGAALQQVYTGIEGVERSLGFDPSDPIVPFFLLFGTSATLWVFYWVWAYGGYSGDLSPKLTLELLSGKENAFLIDVRPEVLRERDGIPDLRRVARFRYACVSLPEVNGFMGKVLKSGRDLDDSL

SEQ ID NO: 109436 - protein, 194 aa, Gossypium hirsutum
  Clone ID: LIB3829-022-Q6-K6-B12.pep
VGFAAGGVVGDSWGPIRLQQKKVDVGHDLSVDNQSNMESKEQEVHGDSQSSDLNRGGEGHKRGKPRAKRTRSVKAVVKDAEAIIGKTLESNELEHPDESRGESGLADGRATRNARKRNRAQTSQTQTADTEQDGDDSEGRSDSVVGGQRRKKHQKVVLAMPIPGRKRYNLRRLKIGVTVAKDTADHVNNSEAPV

SEQ ID NO: 109437 - protein, 190 aa, Gossypium hirsutum
  Clone ID: LIB3829-022-Q6-K6-D10.pep
ALQVGSRNFMQCLDANSEHPIPISAFCSQTNSSFTSVLNSTAQNLRYLMPLVPKPEFIFIPVYESHAKSAVICAKRLAIHLRFRSGGHDYEGLSYASEIETPFILIDLIQLRSINVDIDDNSAWVQAGATVGEVYYRISEKSKTHGFPAGLCSSLGIGGHITGGAYGSMMRKYGLGADNVLDARIVDVNG

SEQ ID NO: 109438 - protein, 49 aa, Gossypium hirsutum
  Clone ID: LIB3829-022-Q6-K6-E8.pep
MQMIMNHATNNQLEPSIGSTTSKRSDLTTFCTTNLARDQELKRPSFYSR

SEQ ID NO: 109439 - protein, 151 aa, Gossypium hirsutum
  Clone ID: LIB3829-022-Q6-K6-F8.pep
MLSISCIVLFFLLSSFFPFTISTFNLTVPIPHPNPNEVAQEVQRRVNASISRRETLQTTQKDISSCLTGNPIDDCWKCDPDWPNNRQRLADCAIGFGQYAKGGKGGEYYIVTDSSDDDAVTPRPGTLRYAVIQEEPLWIVFPSNMHIKLKQ

SEQ ID NO: 109440 - protein, 105 aa, Gossypium hirsutum
  unsure (1)..(105): unsure at all Xaa locations
  Clone ID: LIB3829-022-Q6-K6-H8.pep
DFCXLKAAFDXQKIXNNLKRKEIEFQVGDNAFLKVSHWKKVLRFGRKGKLTPRFIGPYEITKKIELVAYRLALPLELDRIHNVFHVSILRRYRSNPSHVISIMIY

SEQ ID NO: 109441 - protein, 53 aa, Gossypium hirsutum
  unsure (1)..(53): unsure at all Xaa locations
  Clone ID: LIB3829-023-Q6-K6-A8.pep
LPILPTIAQWDALPYKPWXLRQEFVSDIQGVTSICWRMIYISKPFKGGQIKQG

SEQ ID NO: 109442 - protein, 72 aa, Gossypium hirsutum
  Clone ID: LIB3829-023-Q6-K6-B12.pep
MSFRSIVRDVRDSFGSLSRRSFDVRLVGHHRGKSHGALHDLHDEPLVIQNGRWANLPPELLTDVIKRLEESE

SEQ ID NO: 109443 - protein, 75 aa, Gossypium hirsutum
  unsure (1)..(75): unsure at all Xaa locations
  Clone ID: LIB3829-023-Q6-K6-C7.pep
RVXTHASAHAVXKKKKKKKKKKKEKKKIKGKKRYERNERVRNSSMYRDTLNLIGWPVFNGLIFSGPNLCDWRSWV

SEQ ID NO: 109444 - protein, 74 aa, Gossypium hirsutum
  Clone ID: LIB3829-023-Q6-K6-D10.pep
MNVHRWCSLKHFGHAMKAIETVSSKKKKKKKKKKKKKKKKKKKKKKKKKKKKKKKKKKKKKKKKKKKKKKKKKG

SEQ ID NO: 109445 - protein, 63 aa, Gossypium hirsutum
  unsure (1)..(63): unsure at all Xaa locations
  Clone ID: LIB3829-023-Q6-K6-D11.pep
PPPPRGGGXKKKKKKWRHXAVHCEEQSRIWYFFTPHKINQGIPLCXFFITXTSPIRLTKGTTC

SEQ ID NO: 109446 - protein, 192 aa, Gossypium hirsutum
  Clone ID: LIB3829-023-Q6-K6-E12.pep
GGGSGGKMEQKDCSTKVDKLIEKHAWIATERQLFGRSGTDYDFASRDPHKAGGGLDKLQTEQSSLEKRVNKKVMAMFEKAEDEYNDLMSKKNTVENDKSKIKKTIEELDEKKKETLKVTWVKVNHDFGSIFSTLLPGTLAKLEPPEGCSFLDGLEVRVAFGGVWKQSLSELSGGQRSLLALSLILALLLFKP

SEQ ID NO: 109447 - protein, 189 aa, Gossypium hirsutum
  unsure (1)..(189): unsure at all Xaa locations
  Clone ID: LIB3829-023-Q6-K6-F10.pep
LFNVNRVDNGGRRGVYLLDTLDKDINSFSMRVREWYSWHFPELVKIVNDNYLYARVAKLMXEESKLSEEHVPALTEILGDEDKAKEVVEAGKASMGQDLTPVDLINVQLFAQRVMDLAEYRKNLYDYLVTKMNDIAPNLASLIGEVVGARLISHAGSLTNLAKCPSSTLQILGAEKALFRALKTRGNTP

SEQ ID NO: 109448 - protein, 137 aa, Gossypium hirsutum
  unsure (1)..(137): unsure at all Xaa locations
  Clone ID: LIB3829-023-Q6-K6-F11.pep
CQXXFQXSQXHDXXIYXXNTXXQXXTXFILXLDXIWXGXVVTGLTXXVDTAQTSXXELXVIIILPXXPQXYMTFESCRXXRLQMHSTSSPFTLXQVTMLKKALTDGAXXLWVQTPPRTRFLXVFXKXXIQQKNKSXP

SEQ ID NO: 109449 - protein, 129 aa, Gossypium hirsutum
  unsure (1)..(129): unsure at all Xaa locations
  Clone ID: LIB3829-023-Q6-K6-F12.pep
MQETIVLYPSPGLGHVFSMVELGKIIFHHYNNRYSITILLTTGFWDTPTIISYINSVSQAFPSISFFRFPSISIDLSQNCSGAATPPKKXGXHAQKKKNSLHQISKSHKISAFIIDFFLHCGFIYGKRS

SEQ ID NO: 109450 - protein, 145 aa, Gossypium hirsutum
  Clone ID: LIB3829-023-Q6-K6-F9.pep
MESAQQQRRGGGGLVSLSPSQTPRSNDKSVRDLRSADSNSSSKQDKGVNVQVILRCRPLSEDETRIHTPVVISCNESRREVCAVQNIANKQIDRTFLFDKVFGPSSQQKELFDLAVSPIVNEVLEGYNCTIFAYGQTGTGKTYTM

SEQ ID NO: 109451 - protein, 85 aa, Gossypium hirsutum
  Clone ID: LIB3829-023-Q6-K6-G7.pep
MKALRRSQTSSSSSNSPSSSSSSSSSSSSWTYLRSVLFVVTSSSPAACSSADSGRLKSPWSRRRKKHALSPQQWRSLFTPDGRLR

SEQ ID NO: 109452 - protein, 129 aa, Gossypium hirsutum
  unsure (1)..(129): unsure at all Xaa locations
  Clone ID: LIB3829-024-Q6-K6-A10.pep
KSYQPNLIVYSTMLKGLCKTGNTGRAVRFLRLRESRGYEPDIVAYSTVIDCLCKNGLLQEALNLLSEMKVKGIRPDIITCTCLIHGMCYLCQQEEATRLLNEMADNNILLDIXTYTLLIDALCKVRNDF

SEQ ID NO: 109453 - protein, 86 aa, Gossypium hirsutum
  Clone ID: LIB3829-024-Q6-K6-B11.pep
LFSPRNSKQQNPCLKLKALHSFLIIFFDLHTIPSFYKIKTLLVFQPNDQNPPRNTQTFDRNLPRKFDQKFSAKKQVGSPPKRFRGF

SEQ ID NO: 109454 - protein, 191 aa, Gossypium hirsutum
  unsure (1)..(191): unsure at all Xaa locations
  Clone ID: LIB3829-024-Q6-K6-B9.pep
STNKXGXKFLHLAVSGFQTPAFRRVDRQVNLMKRLVHAKNFSMEDIVNAKNNDGRTALHMAIIGNVHTDLVELLMSAKSINVNIRDADGMTPLDLLKQRPHSASSDILIRHLISAGGMFGCQDYTARRAIASHIKMQGHGSSPGTSFRISDTQIFLYTGVETTSDASDLGSGGKSRSSSTDFDSADENRKS

SEQ ID NO: 109455 - protein, 73 aa, Gossypium hirsutum
  Clone ID: LIB3829-024-Q6-K6-E10.pep
FVVLVVLVFVIHNCDKHDATETCGCEPAFLLMNQRYSNLTTGIGFMKNFNLKLVNRPNILLPIFLFKHELIPF

SEQ ID NO: 109456 - protein, 197 aa, Gossypium hirsutum
  unsure (1)..(197): unsure at all Xaa locations
  Clone ID: LIB3829-024-Q6-K6-F11.pep
VRPXYVAPXVXKRGDGPEADVWSAGVIIYILLCGVPPFWGETEEEIFDEVLNGEPDFTSDPGASISESAKDLLAKMLVRNPKKRITAHEVLRHSWVQADGVAPDSPLDSLVLGRMKQFSSMNKLKKMALRVIAQRLSQEEIAGLKEMFKMIDTDNSGQITFEELKAGLQSFGASLPESEFQALMQAADVNNSGSIDY

SEQ ID NO: 109457 - protein, 196 aa, Gossypium hirsutum
  unsure (1)..(196): unsure at all Xaa locations
  Clone ID: LIB3829-025-Q6-K6-A10.pep
LXGAIRVNPWNIDAVAEAMDSALIVSEXAEKQLRHXEKHYRYVSTHDVAYWARSFLQDLERACGDHLRRRCWGIGFGLGFRVIALDPNFRKLSVEHIVSAYRRTKNRAILLDYDGTLMPTGSLNTTPNIEAVGILNNLCQDPKNLVFLVSGKDRKILTEWFSCCKKLGLAAENGYFIRPNHDSDWETCVSLPDFDW

SEQ ID NO: 109458 - protein, 141 aa, Gossypium hirsutum
  unsure (1)..(141): unsure at all Xaa locations
  Clone ID: LIB3829-025-Q6-K6-A9.pep
VDPAFAEAYKFAYVRXEDLFFSQLTVRETXSLAAELQLPEISSVEERDEYVNNLLFKLGLVSCAGGVIGDAKVRGISGGXKKRLSLGCELIASPSVIFADEPTTGLDAFQAEKVMETLRLLAQDGXTAMCLLPASLGGHRL

SEQ ID NO: 109459 - protein, 102 aa, Gossypium hirsutum
  Clone ID: LIB3829-025-Q6-K6-B11.pep
LSGSKAGRVGGRVGGRVGFFFFFFFFFFFFFFFFFFFFFFFFFFFFFFFFFFFFFILFKLFYKVIYTSDFVFVLFFLLIFFFEINKFKKIKCKIKVKIKNFL

SEQ ID NO: 109460 - protein, 180 aa, Gossypium hirsutum
  unsure (1)..(180): unsure at all Xaa locations
  Clone ID: LIB3829-025-Q6-K6-B7.pep
ILKQICKEGSPKLIQALGHQLEGFXEKSKKALMDLLHQKLGIQSTRSSEGDYQYPTSSSRGRESFWPVSEPQASNFPFTHFSNQEVHVNNSYLEGPQNSNSGALLQDHLFGVAANGGVNQVVNCERLPHKSNPGSFAEDQSLLLGAEDLSSSSYADASLVSKSAVNKELGELEGKEQKMD

SEQ ID NO: 109461 - protein, 93 aa, Gossypium hirsutum
  unsure (1)..(93): unsure at all Xaa locations
  Clone ID: LIB3829-025-Q6-K6-C11.pep
IKAHDKQDSSEHHIMNGLISGANDAHLNPHPPHHSKALYPAKQQTPQDRHVSQSNRPVLSYQTETAGSAQCPNPRPDNTQPLTNTSKIPRXQK

SEQ ID NO: 109462 - protein, 101 aa, Gossypium hirsutum
  unsure (1)..(101): unsure at all Xaa locations
  Clone ID: LIB3829-025-Q6-K6-C2.pep
FIILILXTAILSVGLTYIQLSVXXHQWWWRSVFCGGSTAIFMFAYCIYFYTRSSMSGLLQFSFVFGYNACMCYAFFLMLGTVGFRSSLMFVRYIYRAVKSE

SEQ ID NO: 109463 - protein, 113 aa, Gossypium hirsutum
  Clone ID: LIB3829-025-Q6-K6-D5.pep
VVKLITYNNCFHFLSNSILCRVDESNAINTSVTKPCPKDAICDKEKYINAKVSSWIFSIDAHTSIFIFHHPCILPHLLLSCIVPWGSWLGFSLSRKHLFALSLLPSKLICGLF

SEQ ID NO: 109464 - protein, 185 aa, Gossypium hirsutum
  Clone ID: LIB3829-025-Q6-K6-D9.pep
HLTQVSSSLRTPSFSSSSSSLPSSLGSSYYQDDSPLSPVTPFRYSGVPFSWERLPGIPKMLQSHKKKDSIKLLPLPPPTSKEASFNRKKSSSSTSTAVAESFRKDPFFTALVECSKDDEDDDERSSSKFRSGAKITRSISDRFGFINLYTCCKRTCAVSESIVYLPRRSSRTGTAKYGLINRRSR

SEQ ID NO: 109465 - protein, 67 aa, Gossypium hirsutum
  Clone ID: LIB3829-025-Q6-K6-E11.pep
RPKWLGGMGFKDLFLFNKALLAKQVWHILNCPSCLLAKVFKARYFPFSNSYSKSILTFITGEALQCS

SEQ ID NO: 109466 - protein, 63 aa, Gossypium hirsutum
  Clone ID: LIB3829-025-Q6-K6-E12.pep
LFFFLFFFFFFFFFFFFFFFFFFFFENLNIFHELIYCYTVRLQSFLIPRNKEQRHWDVAGDSL

SEQ ID NO: 109467 - protein, 98 aa, Gossypium hirsutum
  Clone ID: LIB3829-025-Q6-K6-F10.pep
GNSFPSRPEGVNPRPPCSPRVSQITGGLLGFKVLRVSHLKGLPFLVYPWVLSLLLWPPLNGWFFIPFSLGLCGPIFPPLVFSPLSLGIFFPSFKFLGF

SEQ ID NO: 109468 - protein, 186 aa, Gossypium hirsutum
  Clone ID: LIB3829-025-Q6-K6-F4.pep
MKRRQRVVILSLAHRPEAEAEAEAQAGAATSIVTKGSSESSIRKEEVRIFGEAKIDAGNGGGSFYGNGGSGGGGGGDGGCDGGDGEKGDPEEEEFGPLMKFEDVMKETNARGATLPSDMMEAAKTVGIRKLLLLRYLDLQGSSWPLGFAMRSWGMLRNRMLADPSFLFKIGTEIVIDSCCATFAEV

SEQ ID NO: 109469 - protein, 205 aa, Gossypium hirsutum
  unsure (1)..(205): unsure at all Xaa locations
  Clone ID: LIB3829-025-Q6-K6-F5.pep
GSTQRSRHAREPPILRQLPRXTANMRGSQMQVSPDQAQLLAMLVQILGAARCIELGVYTGYSSLAIALALPESGCLVACERDAKSLEVAKRYYELAGVSHKVSVKHGLAADVLKSMISNGETCSYDFAFVDAEKRMNQEYFELLLQLVRVGGVIVIDNVLWHGKVADPLVNDVKTVSIRNFNRNLMADDRVSISLVPIGDGMTIC

SEQ ID NO: 109470 - protein, 188 aa, Gossypium hirsutum
  unsure (1)..(188): unsure at all Xaa locations
  Clone ID: LIB3829-025-Q6-K6-G11.pep
TFLHRSKCSNXFLTKDQDIRLGDFGLAKMLTSDDLASSVVGTPSYMCPELLADIPYGSKSDIWSLGCCLYEMTAHKPAFKAFDMRALINKINRSIVAPLPTMYTSAFRGLIKSMLRKNPELRPSASELLSHPHLQPYVLKVHLKLNSPRCNNIPTRWSDLNFVKKTRFVEQDVIGRRRSFSNDRALNP

SEQ ID NO: 109471 - protein, 47 aa, Gossypium hirsutum
  Clone ID: LIB3829-025-Q6-K6-G3.pep
KYIMIVQNIRWDLHISQMNLVSRERSVSNNLSFETVTYITTLNHYIF

SEQ ID NO: 109472 - protein, 173 aa, Gossypium hirsutum
  Clone ID: LIB3829-025-Q6-K6-H10.pep
MEVESCEIGGGGGGGSATKTGGLSGGVRAEIDTSAPFESVKEAASRFGGIGYWKPSQPKLMSETEHDGEEVDIAKLEEQAAKLEKDLIVKERETLDVLKELETTKLTVEELKLKLKKEASEVDVKNTDAEKENRRGDHPNLVGSLSPCPSAAPGLILMELKQAKLNLSRTTND

SEQ ID NO: 109473 - protein, 75 aa, Gossypium hirsutum
  Clone ID: LIB3829-025-Q6-K6-H9.pep
FKQKRSFITHRAFCDALAEESARLTSVAATSLNFRNDTVNLPHGFAGRGVQDVAGIPQFGSGFAQDFSGMPAPGR

SEQ ID NO: 109474 - protein, 81 aa, Gossypium hirsutum
  unsure (1)..(81): unsure at all Xaa locations
  Clone ID: LIB3829-026-Q6-K6-B11.pep
TLGSFSVTHXXCPKPKTETKTKYNYKFNKTWPKLPAQLLAQITAQAIEQFQQKKLNPSSSFFGVAAIVPLPPRCSGFAHDQ

SEQ ID NO: 109475 - protein, 108 aa, Gossypium hirsutum
  unsure (1)..(108): unsure at all Xaa locations
  Clone ID: LIB3829-026-Q6-K6-B7.pep
FLLFSEADPLTALIHAVQVMNFLKTLILKXLREREELAAKGRSLPSYSDSPTAITGIHTETINSGVPHDEALDGSALKEPHTAKFFRSATLSRLECSAYDKLWSFQYE

SEQ ID NO: 109476 - protein, 100 aa, Gossypium hirsutum
  Clone ID: LIB3829-026-Q6-K6-B9.pep
TKHFSGLVLQCKILLYPLNLNVRKIHHKESNFKKFKGKVILQLTTWMIIQLNRMLERKAPDPIFEYFTYEKNLHHQLQQNPTTFYTQQFESFPSTVYESH

SEQ ID NO: 109477 - protein, 193 aa, Gossypium hirsutum
  Clone ID: LIB3829-026-Q6-K6-C6.pep
ERSALIDVRNDSPIIGLAMGTPLSETSKQWRANKMMKMMTPGSGEALLRSQVKTLLQKVEEEEPEVSNVPSGSCHFLRGQSCVVSPMGLVAPTPANTPQVEGSIVMALPVVEENLRISEVVSIIFDGVGVESEKSEITRSLLVEFSEKSETSEDSSECCYSMVTHECSAGKEKVSSSSSSIDDDNSSVWSIQV

SEQ ID NO: 109478 - protein, 147 aa, Gossypium hirsutum
  Clone ID: LIB3829-026-Q6-K6-C8.pep
MESSSSASFKRARAPATGNQVPSCLVDGCTADLSKCRDYHRRHKVCEVHSKTPKVTIRGQEQRFCQQCSRFHSLVEFDEVKRSCRKRLDGHNRRRRKPQPDFMSVNSGRFPYNHQGTRYFPIGSSQMHSWMGGVKVESDMKLINFSG

SEQ ID NO: 109479 - protein, 97 aa, Gossypium hirsutum
  Clone ID: LIB3829-026-Q6-K6-D12.pep
LLPPPVKPEAVALTQVNIFHTTPEHSIIYTSIARAGIEICQDLNTDVRNHSTAVDHLENSVTAYLAGLFHVSNLWTINAETDTLMPLDINLCKTIMS

SEQ ID NO: 109480 - protein, 190 aa, Gossypium hirsutum
  unsure (1)..(190): unsure at all Xaa locations
  Clone ID: LIB3829-026-Q6-K6-D9.pep
RLPLQKAQXLDPAGDAFNEQIDQAIRDYAIAQREQCYEIIASALRSLKSEFRSPARPVAVRSVLDHASRXKYICQIVQLSVQSPDRLFHEYLYRTMIDLCLENELLEYGGPDLVPFLQTAGCEPAQEVRALSALTSATPSVGQPGASIHSNQAKYFDLLARYYVLKRQHLLAAHVLLKLAERRSIDGSNA

SEQ ID NO: 109481 - protein, 172 aa, Gossypium hirsutum
  unsure (1)..(172): unsure at all Xaa locations
  Clone ID: LIB3829-026-Q6-K6-E1.pep
IRRAPKLVETGNKHWCSQEQRTRGTLNSVMSELYHLKKXGAVRFTRKNDNIRPFESGGXETSLEFFSLKTDCRIXVYGSHSKKQPNNLAIGRMYYHHVYDLLKVGGENFKYIESFTYDKKITPQVGSNPFIAFHGLRFEIVYELKHLKEVSLDLLRXKADENINLAGSDRAY

SEQ ID NO: 109482 - protein, 182 aa, Gossypium hirsutum
  unsure (1)..(182): unsure at all Xaa locations
  Clone ID: LIB3829-026-Q6-K6-E11.pep
MXMIHVWDSQTGKLISVFSEPSTDSLHLVSPLSSSTNIGADHVDMLNSNTSSSGVLSSPFDESLYTCMHYLEEVEKLVVGTGNGSLRFLDVSQGRKLHLWKGEFSESAFPSLVSAICSCGSNKEQGNGASASPSWIAAGLSSGHCRLFDVRSGSVTACWRAHDGYVTKLAAPEDHLLVSSSL

SEQ ID NO: 109483 - protein, 119 aa, Gossypium hirsutum
  Clone ID: LIB3829-026-Q6-K6-E6.pep
LLRQAEPSIIAATGSGTTPAAHEISCASGLTTTSSPTESCQLHPVGIGSGVVAGMYTVTTPPPSCRLDLCQPMGFQYSTVGRNGYQHMPFTALLLQPTAAAEEEQQVGKEEEEEKRHQE

SEQ ID NO: 109484 - protein, 154 aa, Gossypium hirsutum
  unsure (1)..(154): unsure at all Xaa locations
  Clone ID: LIB3829-026-Q6-K6-E9.pep
VXNELMLFLLAAAVLRWKATGWSFWFIPDMDMDTCQVTLATCRVILDMDTRVMGTDTGTHTRMDMGIVTRPMFRTIQCLFTHLTRCLMMRILMLVPFCEDKWGLWYSLSAKWEDLLALSMPIDRLFIHSPTETNGKSSLGNENFVLKLGALKPL

SEQ ID NO: 109485 - protein, 185 aa, Gossypium hirsutum
  unsure (1)..(185): unsure at all Xaa locations
  Clone ID: LIB3829-026-Q6-K6-F12.pep
MTVFKXDDGVAYLIYSSEXNSELHIGPLTKDYLDVKPDMRRILVGQHREAPALFKYRGTYYMITSGCTGWAPNEALAHAADSIMGPWETMGNPCIGGNKMFRLATFFAQSTFVIPLPGIPGSYIFMADRWNPADLSDSRYVWLPLIVGGPADRPFEFNFGFPLWPRVSIYWHRKWRLPSSWRVTK

SEQ ID NO: 109486 - protein, 158 aa, Gossypium hirsutum
  Clone ID: LIB3829-026-Q6-K6-F7.pep
IYSKFAELGMAGERRVSLSPHKVMSALSLYIQNFDLTSQQDAAEAFLHLLSSLREEFSDIYLPNQSTLADIFASQTSRILTPERKEVQNEQKRWQQHYLGPFDGIIGSILSCRSCSYQISLDFQFFHSLPLFPVLYGASTIMAGCTLEDCLWQFVLAE

SEQ ID NO: 109487 - protein, 43 aa, Gossypium hirsutum
  Clone ID: LIB3829-026-Q6-K6-H1.pep
APPPTGPPSPSPRTRPGRASSAKQAAPRSATQSPRHTLSLVIG

SEQ ID NO: 109488 - protein, 62 aa, Gossypium hirsutum
  Clone ID: LIB3829-026-Q6-K6-H3.pep
FCTKSSQFSPDHHRSPLTYTSPTTSIALISHLPPHTKPLIPHLLRPPQLTSNPHPACLSDPT

SEQ ID NO: 109489 - protein, 195 aa, Gossypium hirsutum
  unsure (1)..(195): unsure at all Xaa locations
  Clone ID: LIB3829-027-Q6-K6-B10.pep
XKFIAIFALKTAGAVNPDTKEASQTGNLTIRIGKDKGRRRRKRKGGFKELIEVSSSQSGNSTPSSPHSPTSVTSNRTWPLSPDVEQPIESRNPFTHLANQIREKGKVPQPISKANVLGPKVSVEHVSNNWYSSQEQPRIPRQNVSQPVLSYSATFPCASRATTSTRSSSSPLASMSVIAPCARAPGSKLSDQKII

SEQ ID NO: 109490 - protein, 194 aa, Gossypium hirsutum
  Clone ID: LIB3829-027-Q6-K6-B4.pep
PVAWDWETYVKRKTTEIPRRLRPVEWDIDEGEGGLDSVSVNSSSVAGCSGGSGSDLGLVSLSKNLKSASIDSLSMGEAKLTKFTLEASEAIPDDISNKKEVSGIETTSTSLTLVASVGSGEPLLSLKLGKQTYFEDVSTGTNATDSSYSATLGTSSPLSAKRSKLNCRSTHAVRCQVEGCNLDLSSARDYHRKH

SEQ ID NO: 109491 - protein, 191 aa, Gossypium hirsutum
  unsure (1)..(191): unsure at all Xaa locations
  Clone ID: LIB3829-027-Q6-K6-C8.pep
STSSLHNLQTLNLRHCCNLQMLPKGTDRXLKNLRYLDIRNCHELTSMPVALGQLSFLRKLSMFIVGKEDGCGIDELKGLALEGELSIKGLHNVKSSMEARNANLIKKHNLRSLSLSWRLSSNKSSHHQNDEEILSALQPHSNLKKLRIIDYQGLMFPYWMMDLLLPNLVEISLGYCERCHQLPPLGKLRFL

SEQ ID NO: 109492 - protein, 89 aa, Gossypium hirsutum
  Clone ID: LIB3829-027-Q6-K6-D6.pep
WCHNDTKRRDFLKEIPSSLYDLVDKCLTVNPRVRITAEDALKHEFLASIHENLRKQRAFKQGLSSNSGTNSSNNLLLGGRISKSLKVSL

SEQ ID NO: 109493 - protein, 54 aa, Gossypium hirsutum
  Clone ID: LIB3829-027-Q6-K6-E7.pep
AEPAGWLWHAKLAQDITARARGLTTDPPACLKSSDTSGINLTIDALGDHAGYCL

SEQ ID NO: 109494 - protein, 84 aa, Gossypium hirsutum
  unsure (1)..(84): unsure at all Xaa locations
  Clone ID: LIB3829-027-Q6-K6-F1.pep
MPHKSSGYMADPNFDYHVTPPSTPYIEHQXQLYLHMISKHANKYHHDRFQDFNQYVDHMIDHYDIPKAGTILLTQNEGNLVSGF

SEQ ID NO: 109495 - protein, 185 aa, Gossypium hirsutum
  unsure (1)..(185): unsure at all Xaa locations
  Clone ID: LIB3829-027-Q6-K6-F11.pep
IFDTQVRVIAKWCTLIGQIRGFYWGXRESLFYILPNGSLXNSRYRKXGSSPCHLPWEARLKIAKGVARGLAYLHDKKHVHANLKPSNILLGPDMEPKIGDFGLERLVTCDTSTKVGVSARNFGSKRSTASRDSFQDLTGPSPSPSPSSFGLSPYRAPESLRSLKPNPKWDVYAFGVILLELLTGK

SEQ ID NO: 109496 - protein, 185 aa, Gossypium hirsutum
  unsure (1)..(185): unsure at all Xaa locations
  Clone ID: LIB3829-027-Q6-K6-G11.pep
NSSGTGTGFEIXCQGFNWESHKSGRWYMELKEKASEISSLGFTVIWLPPPTESVSPEGYMPKDLYNLNSRYGTIDELKELVKSLHEVGMKVLGDVVLNHRCAHFKNQNGVWNIFGGRLNWDDRAVVADDPHFQGRGNKSSGDNFHAAPNIDHSQEFVRKDLKEWLGWLREEIGYHGWRLDFVRGF

SEQ ID NO: 109497 - protein, 60 aa, Gossypium hirsutum
  unsure (1)..(60): unsure at all Xaa locations
  Clone ID: LIB3829-027-Q6-K6-G2.pep
WSRFSRVTGSILVQKDRERRSCLTPFFFFFFFFFFFFFXQAILVKPIHAKMQPMRWHRVG

SEQ ID NO: 109498 - protein, 96 aa, Gossypium hirsutum
  unsure (1)..(96): unsure at all Xaa locations
  Clone ID: LIB3829-027-Q6-K6-H12.pep
VRITXNXNACACNFACTKLTASFVSLFFFTDKNWSLKTHNQTKEFFFLFKLWIYNEGSRLSFFFWWWVLNGRDNEAIFFHVQWVSKVNKWENFXEW

SEQ ID NO: 109499 - protein, 99 aa, Gossypium hirsutum
  Clone ID: LIB3829-027-Q6-K6-H6.pep
VLISSKYGFPGFDLTATTMGQMSFTSMLGAANQQLPGLELGLSQEGHFGVLNPQALTQIYQQMGQARVHQQQQHQNHHHHHHHHQQQPPAKDDSEGSGE

SEQ ID NO: 109500 - protein, 141 aa, Gossypium hirsutum
  unsure (1)..(141): unsure at all Xaa locations
  Clone ID: LIB3829-028-Q6-K6-A6.pep
KNCATVMLRLAWHSAGTFDVKTKTGGAFXTMKHTAELVHAVNNXLNIDDRLLEPIKDQLPNLTYTDFYHLAGVVVVEITGGPEIPLHPGRXDMPHPPTEGRLADATKGSDHLRQVFSAQMGLIDQNIVXALSGGHTLRRCH

SEQ ID NO: 109501 - protein, 159 aa, Gossypium hirsutum
  Clone ID: LIB3829-028-Q6-K6-B10.pep
MNKMMERKSSGRRRVFVQTETGSVLGIELDRSDNAHTVKRKLQIALNVPIEERSLIFGDVVLKNDLSTVRNDSPLLLTKNFMHRSSSTPCLSPTGKDVQQRDQSGPIEILVCSDHFSRIRKLVRKIVEAMKFGIDPIPVCGGLGGAYYFRDCQGENCAI

SEQ ID NO: 109502 - protein, 198 aa, Gossypium hirsutum
  unsure (1)..(198): unsure at all Xaa locations
  Clone ID: LIB3829-028-Q6-K6-B4.pep
ELQXPKTNLECKLGIREAIRQLDSLSSVGSIEGSVIAPXGSVYHEHIFCAKCELREAFPDNDIVLCDGTCNRAFHQKCLDPPLDTEHIPPGDQGWFCKFCECKMEIIEAMNAHIGTHFSVDSHWQDIFKDEAAFPDDANASLNPGDEWPSDDSEDDDYDPERRENSCRISGTATDGDESDETDNSTSLSWSVDSEDLS

SEQ ID NO: 109503 - protein, 154 aa, Gossypium hirsutum
  unsure (1)..(154): unsure at all Xaa locations
  Clone ID: LIB3829-028-Q6-K6-D6.pep
KKLFELNLSNNHLSGPIPRTIGGLLELQFLDLSKNSLTGTTPKELGNCNKLLSLNLNHNKLSGDLPGELGSLDVLQYSLDLSSNSISGKIPPELGRLISLENINLSHNNLSGEIPTTLLQMISLYSFDFSXYNELTGSVPIAGPFQNASQEAFA

SEQ ID NO: 109504 - protein, 114 aa, Gossypium hirsutum
  unsure (1)..(114): unsure at all Xaa locations
  Clone ID: LIB3829-028-Q6-K6-E1.pep
NLFILQVVHDVDRQRIPVRFVITSAGLVGSDGPLQCGAFDITFMSCLPNMIVMAASDEDELIDMVATATRIDDRPVCFRYPRGALVRTDYPIXXGSALEIGTGKVLVEGKDVAL

SEQ ID NO: 109505 - protein, 199 aa, Gossypium hirsutum
  unsure (1)..(199): unsure at all Xaa locations
  Clone ID: LIB3829-028-Q6-K6-F7.pep
FQFASDPXVTVRTKXLGAISSLIRHNKPGIAAFRLANGYAALRDAVGADSARFQRKALNLIQYLLHENYSDCNVVKELGLPRVMLHLASSEDAEVREAALRGLLELARDKTGGSNGGLGEEDEKLKQILEDRIKGISLMSPEDLGATREERQLVDCLWSTCYKEPSSLREKGLLSLPGEDDPPPDVASKHFEPPLKGWA

SEQ ID NO: 109506 - protein, 85 aa, Gossypium hirsutum
  Clone ID: LIB3829-028-Q6-K6-G5.pep
GSQDELFTVNFIKNYIRELDDLGRILPKKCGAMKWWKSPRNACVKVNFNATYRKNEESLCSSILLKDSRGRVIASKNYFSPEYYG

SEQ ID NO: 109507 - protein, 70 aa, Gossypium hirsutum
  unsure (1)..(70): unsure at all Xaa locations
  Clone ID: LIB3829-028-Q6-K6-H1.pep
CKQIIKTLSSLCDEHHELGIREMERNKXSHLEERQRSYCIYALKDLSFIYIYIEFYDTYTVCTMSNITSD

SEQ ID NO: 109508 - protein, 77 aa, Gossypium hirsutum
  Clone ID: LIB3829-028-Q6-K6-H6.pep
TDFKSITRKLVGESQSKNHITRNVSRNYLCSDMFVALISNNFKQKRDPCQQRLYLNNIKTSYKNKRFINYMFIGLKP

SEQ ID NO: 109509 - protein, 197 aa, Gossypium hirsutum
  Clone ID: LIB3829-028-Q6-K6-H7.pep
VSGSRRTLPVEAGTDGNANQSSSAPSALFEDKPHSANDAWRKLHSDPLLMIRQREQEALARIKNNPVQMAMIRKSVVEKKQKEKSPDHKEHRKKHHRSSSKHRKHSSSKRHSYSEDDTSKEDKKDKNHHRKRSDYEGHYRRTESDSEHELKETEREEKSHRRQKYGYDDQDVDKRSHDKSKRDKYSSQASRSIDADK

SEQ ID NO: 109510 - protein, 133 aa, Gossypium hirsutum
  Clone ID: LIB3829-029-Q6-K6-A10.pep
MDHFTTQRVTSELWVTVNLTRCRRAKNKVIKKLVRNVKKEFALLWDYANELRSKNLGLDCYFLKGPYKGEMLPAVGRDANNQMYPVAWVVVEGECTNSWAWFLNILAVDLDLKAYTHALQPINGPHKWRKSGI

SEQ ID NO: 109511 - protein, 177 aa, Gossypium hirsutum
  Clone ID: LIB3829-029-Q6-K6-A12.pep
EKKKKKKKKKRKKKKKKKKNNKRKKKKKKKERRGKNFKGACFNTPMLAAAFCSGRSCFIFLGRAKGYLAVPCISKFREVEKLCGCPIHSPFTEWGFFEWGLKTRLFPPISFPKRGTAPRTERANLCRGFWERSFGVVTSLCGGFIGLTLRSFHFFFPHMVAIHCRGVSRGGLTWVGF

SEQ ID NO: 109512 - protein, 186 aa, Gossypium hirsutum
  Clone ID: LIB3829-029-Q6-K6-B7.pep
TLLLSLHSFLADSLQNPKPDISAYYQTRAAHHAVVTSDWLSQAQAAVSLQTNDDVSSGSDGRVAPTGGGTGGDNKTFSVIDEFNSWRKQPDLAEAVAAIRALAAVIRASQATTMMELEIELKKASDSLKAWDATSISLTAGCDLFMRYVTRTSALEYEDFNSARYRLIERAEKFGEISYKARRIIA

SEQ ID NO: 109513 - protein, 47 aa, Gossypium hirsutum
  unsure (1)..(47): unsure at all Xaa locations
  Clone ID: LIB3829-029-Q6-K6-C8.pep
LLTXIGSLIMRLDPSLLVYKYYESGITMIVTCEQGYCTVSILIKLLK

SEQ ID NO: 109514 - protein, 53 aa, Gossypium hirsutum
  Clone ID: LIB3829-029-Q6-K6-E8.pep
KILRRRQGSVCKAWFLLKRPALFFFFFFFFFFFFFFFFFFFFFFFFFFFFHAA

SEQ ID NO: 109515 - protein, 70 aa, Gossypium hirsutum
  Clone ID: LIB3829-029-Q6-N6-A7.pep
GTGKIPAKEILQIVKENFGFRAGLVPPNLGFKRGGNGRFFKTPASGPFGRGDPGFPWEVVKPPQWGKPPF

SEQ ID NO: 109516 - protein, 84 aa, Gossypium hirsutum
  Clone ID: LIB3829-029-Q6-N6-B11.pep
VNMPARAEQIPGKEENMFHESYDVVLYLGIIDILQEYNMTKKIEHAYKSLQFDSLSISAVDPTFYSQRFLQFIQKVFPLNSMKT

SEQ ID NO: 109517 - protein, 64 aa, Gossypium hirsutum
  Clone ID: LIB3829-029-Q6-N6-D10.pep
KGLKEKPVHTCPSFNKERYHIHIHSPFLSTKKGITFTYLYSLHTIIILLRLCLQKASQINGDGL

SEQ ID NO: 109518 - protein, 166 aa, Gossypium hirsutum
  unsure (1)..(166): unsure at all Xaa locations
  Clone ID: LIB3829-029-Q6-N6-E8.pep
TRGYRPGNQNRDQGGEKKSPKGRGKKGGGTKGKSGPRGKREARGDYPGKKNGEKKGEKPGGPKGGTTQRKGGGRKGRLARRKNGGKGGXKGGAKRRGKGAPGEGPRGAGPSTRGKGQKPKGLPSRGLERGNQGGPSGVSPGGKKAGGGGGDKGEKKKKAGRGGGGG

SEQ ID NO: 109519 - protein, 75 aa, Gossypium hirsutum
  Clone ID: LIB3829-029-Q6-N6-F12.pep
SGRTHQIRLHAQYLGFPIRGDVKYEGVYEWKGRTYEAHELHAESLTFQHPVTGFPLLIQAPLPLWASQALQLLTD

SEQ ID NO: 109520 - protein, 44 aa, Gossypium hirsutum
  Clone ID: LIB3829-029-Q6-N6-H10.pep
GDDPWQEFVNNVWYIKILSPLEVQQMGKEGLNPAASDPSQTHHQ

SEQ ID NO: 109521 - protein, 63 aa, Gossypium hirsutum
  Clone ID: LIB3829-030-Q6-K6-A12.pep
FKIMVGAPLVAFVTTHILYLNFYKLDYGLNMKVCMARGVAQLLIWGIWAGISSHPSRWKVWLF

SEQ ID NO: 109522 - protein, 147 aa, Gossypium hirsutum
  unsure (1)..(147): unsure at all Xaa locations
  Clone ID: LIB3829-030-Q6-K6-A9.pep
ATPGQFQLVNNVVEKLGYEVKXVRITERVVNTYFAKLYLSKPGXNDVIIVDARPSDAINVANRCKAPIYVNKQIVLADAIRIGYGMGRVRDKKSTYDVSLDSAADGPDLLLEELDLVRNMDLAVKEERYTDAAKLREKLMKLRDHGQ

SEQ ID NO: 109523 - protein, 83 aa, Gossypium hirsutum
  Clone ID: LIB3829-030-Q6-K6-B11.pep
IGLSSLTPTMCICHMWVMSYFFFFELVWIFPILHLLCVVLIGFYIAIGQAYICTCSILVIVVLAFQIFTNAKRSGFGPSIMPN

SEQ ID NO: 109524 - protein, 54 aa, Gossypium hirsutum
  Clone ID: LIB3829-030-Q6-K6-B12.pep
SSSRSCIKMVMLSFPPLSSMCNASLTVYMYFKRVTGLLITAVTKTPCPTSVFSF

SEQ ID NO: 109525 - protein, 128 aa, Gossypium hirsutum
  Clone ID: LIB3829-030-Q6-K6-B9.pep
GPYTLGIASLQKLGIDLSVMGRDIDIGDDAHYNSPLTSCSDISTTTTEGTSMSFCGAGPKQSKKAAKNRAAMKGSKKAVGDSERRQPIYRGVQMRDGGQRVSEVPQPKKKCRRWVGDLPRPEEMAASS

SEQ ID NO: 109526 - protein, 59 aa, Gossypium hirsutum
  Clone ID: LIB3829-030-Q6-K6-D9.pep
RCIMRFYYIATAKPFCCVWWTASLMHVIPSNGTNDLFLSDTTYYMLTRCKNIILETLRI

SEQ ID NO: 109527 - protein, 68 aa, Gossypium hirsutum
  unsure (1)..(68): unsure at all Xaa locations
  Clone ID: LIB3829-030-Q6-K6-E12.pep
DLLHGQVVPMSTLLKPSWRVFQCSSSLSFIFKYNSNEESTLFLPSILFSFLSLSNDXVXFGVGKNILC

SEQ ID NO: 109528 - protein, 99 aa, Gossypium hirsutum
  Clone ID: LIB3829-030-Q6-K6-G8.pep
MEGAVRVQILSQMGISEVPSQYIQPPKNRPGSVTENIADLSCKHVPAVDLSSEKESVLPAIREACRDWGAFHVINHGVPTKLLDDLRRACFSFFNDFPM

SEQ ID NO: 109529 - protein, 58 aa, Gossypium hirsutum
  Clone ID: LIB3829-030-Q6-N6-A11.pep
CPDFSEKEGAFWKKKGFFESQNKLNPGSFQKTNGAIPQIFKGKGAPPLFKNFFFMLKF

SEQ ID NO: 109530 - protein, 67 aa, Gossypium hirsutum
  unsure (1)..(67): unsure at all Xaa locations
  Clone ID: LIB3829-030-Q6-N6-A12.pep
RWKVWLFVVWGSLVVFLEILDXFPPYKGFVDAHALWHAVSIPLTYFCWSFVQDDAEFRTSTLLKKIK

SEQ ID NO: 109531 - protein, 100 aa, Gossypium hirsutum
  unsure (1)..(100): unsure at all Xaa locations
  Clone ID: LIB3829-030-Q6-N6-D12.pep
NGIQPFFSXGVPIGSGCQHIVAYVTLTTYYIIGLPIGCVLGFKLGLGVKGIWWGMVVGVLLQTITLIILTARTNWDLEVEKAADRLRKSANEETLHLITD

SEQ ID NO: 109532 - protein, 59 aa, Gossypium hirsutum
  unsure (1)..(59): unsure at all Xaa locations
  Clone ID: LIB3829-030-Q6-N6-D9.pep
VMEWFKNPXVPRFFLNEIPPRGALLMPKLNILFPSSAPEIRSLPPPKPLIAGKGIYPCM

SEQ ID NO: 109533 - protein, 56 aa, Gossypium hirsutum
  Clone ID: LIB3829-030-Q6-N6-F9.pep
WSLETRNTGTHPDQPDCPHGQLLTHDNCCPCFVPWGPQQEIILHDEKGLNTIWVPN

SEQ ID NO: 109534 - protein, 75 aa, Gossypium hirsutum
  Clone ID: LIB3829-031-Q6-K6-A7.pep
NITSEDLQQHQVPINKALLIHQIKNLTNGACYDITMIFLFLYTIRWLKKKGNFVHIFNGTRMYFRGKCVQKLVVY

SEQ ID NO: 109535 - protein, 182 aa, Gossypium hirsutum
  unsure (1)..(182): unsure at all Xaa locations
  Clone ID: LIB3829-031-Q6-K6-C11.pep
MTKVPVDSLIGKTIGLYFSAQWCFPCAKFTPKLISIYQXNQAKFGRKSGGVEDFEIVFVSNDRDQSSFDSYYGTMPWLALPFGDPIIRTLAKYFDVQGIPCLIIIGPDGKTVTKQGRNLINLYQENAYPFTDAKLESLEKEMEEEAKRLPRSNYHAGHRHELTLVSEGNGGGPFICCDCDEQ

SEQ ID NO: 109536 - protein, 200 aa, Gossypium hirsutum
  unsure (1)..(200): unsure at all Xaa locations
  Clone ID: LIB3829-031-Q6-K6-F7.pep
SXSSQLIPQHNYKLDVHALNTRQPGEXFRESILGVMPHHWDRREDTLLKLSHFKRHKRKTLKRVPGKSTTYPFHKPEEHHPPGKDDSKKISNLIGKAAKYAGSAKSKKPVAYIPTITNYTQLWWVPNVVVAHQKEGIEAVHLASGRTVCKLHLQXGGLHADINGDGVLDHVQAVGGNGAEQTVISGSMEVLRPCWAVATS

SEQ ID NO: 109537 - protein, 189 aa, Gossypium hirsutum
  Clone ID: LIB3829-031-Q6-K6-G8.pep
AFAKGAIPSSIGHLTRLHYLNLSTNFFSGEILDIGVLSTFRNNSFIGNLDLCGQQVNKPCQTSLGFPAVLPHAESDEVAVPTKRSSHYIKGVMIGAMLTMVLVLVMLLAFLWIYLLSKKERAVKRYTEVKKQLNHDTSTKLITFHGDLPYPSCEIIEKLESLDEEDVVGSGGFGTVYRMVMNDCQTFAV

SEQ ID NO: 109538 - protein, 200 aa, Gossypium hirsutum
  unsure (1)..(200): unsure at all Xaa locations
  Clone ID: LIB3829-031-Q6-K6-H10.pep
VGFALMSAXSFTAEISPASSRGFLTPFREVCINSGILLGYVSNYAFSKLPIKIGWRLMLGVGAISSIFLAFAVLAMPESPRWLVMQGQLDEAKVVLDKTLDTKKEAQLRLDDIKEAAKIPQDSTTGNIIPKQTNGEGVWRELLLHPTPAVKHVLICAIVIHFFQQSSGISAVVXYSPXIFEKAGITSSDGKLLATIAIGF

SEQ ID NO: 109539 - protein, 71 aa, Gossypium hirsutum
  Clone ID: LIB3829-031-Q6-N6-B9.pep
LIGPISRLMPSIEAMGSALILQRGKYVQSMLVSGSRSHSRGSTTKKSPFFSVHAISSFLIFDMVNITQSYG

SEQ ID NO: 109540 - protein, 111 aa, Gossypium hirsutum
  unsure (1)..(111): unsure at all Xaa locations
  Clone ID: LIB3829-031-Q6-N6-F11.pep
FSVISIDEPHVPANLVKHGPLPVGINSVFMQTSIQGVSCPYICGKHLHHGVLIVGXGIRWXAPVRFKNKPXWIIKNSWGEIWGENEYYNICKGNNVCELDSMVFSVSALHI

SEQ ID NO: 109541 - protein, 107 aa, Gossypium hirsutum
  unsure (1)..(107): unsure at all Xaa locations
  Clone ID: LIB3829-031-Q6-N6-G8.pep
TDVYSFGVLLLELVTGKRPTDPXFAKRGLNVVGWTNTLLRENRLEDIVDKGCTDAIMETVEAILEIAAKCTDANPDERPTMCQVLQLLEQEVMSPYPSDYESHSDYC

SEQ ID NO: 109542 - protein, 164 aa, Gossypium hirsutum
  unsure (1)..(164): unsure at all Xaa locations
  Clone ID: LIB3829-031-Q6-N6-H10.pep
LDKIGRRVLLLSSVGGMVVSLATLGFSLTIADHWETKLTWAIVLCMTMVLAFVSFFAIGMGPITNVYMSEIFPLRLRAXGVSMGVAVNRVVSGIISMTFISLYKAITIGGAFFLFTGIATVGWVFFXVCMPETRGKTLDEIECLFGKLVCWKEASKKMNDVTIE

SEQ ID NO: 109543 - protein, 45 aa, Gossypium hirsutum
  Clone ID: LIB3829-031-Q6-N6-H9.pep
KSFRTMRLGKTSYSLGCIFITSVIPRTTQQVIHFLLPDIKQSPGG

SEQ ID NO: 109544 - protein, 157 aa, Gossypium hirsutum
  unsure (1)..(157): unsure at all Xaa locations
  Clone ID: LIB3829-032-Q6-K6-B10.pep
RVFKQTMLDQDIIFRKQVCELHRLYSVQKTLMKDLTTPXSLKSTIHGKQIYNLFPKKTRLPTNSIPLLDSGVSSSLELLEGWKDNNYKYQPRPFDRQLVPDRYIRLGDNNNLPKKVKVGDHLKETLGVNSVHDGGFSDPLELRLSLSLGVAXGEKGR

SEQ ID NO: 109545 - protein, 196 aa, Gossypium hirsutum
  unsure (1)..(196): unsure at all Xaa locations
  Clone ID: LIB3829-032-Q6-K6-B8.pep
PSCNAAVGKEMINKLATSEEKEXYSRYLLRSYVXKNNRKTKWCPAPGCEYAVDFTVGSGNFDVSCNCAFSFCWNCTEEAHRPVDCETVAKWILKNSAESENMNWILANSKPCPKCKRPIEKNQGCMHMTCTPPCKFEFCWLCLGAWAEHGERTGGFYACNRYEAAKQEGVYDEAERRREMAKNSLEKYTHYYERWA

SEQ ID NO: 109546 - protein, 155 aa, Gossypium hirsutum
  Clone ID: LIB3829-032-Q6-K6-D11.pep
MRCKKHIADLSSGVGLCATCLRERLLELIAAQAQAQAQAQQAQLARFAIEDGLKHDPPPLIFPRSVSPYVSRRKSDDNSATWIHNQRFYSTPQVGPTYSTTSTSYFEATRSFKKKNRFSLFSNLLRSRSEKFNSDPRVHFHRDSCDEPSTSSASP

SEQ ID NO: 109547 - protein, 88 aa, Gossypium hirsutum
  Clone ID: LIB3829-032-Q6-K6-D9.pep
SVLTPMDSSHRVEQYRSCFLHYHIICIMCIYTCYTSCIPVYCQYLMVIITISIFIRFIRVFLVSSHLSPCCVPDISAFSTVSASHTYQ

SEQ ID NO: 109548 - protein, 99 aa, Gossypium hirsutum
  Clone ID: LIB3829-032-Q6-K6-E11.pep
VGHRAPAVSISHDGISCQATHKRVALWSERYPTTSLVMLDQPLYHPVGRAKIVHNHVYAAHQNIHIENISPRPSHSSLRFKQNVPWQQWTLNSSAACSG

SEQ ID NO: 109549 - protein, 184 aa, Gossypium hirsutum
  Clone ID: LIB3829-032-Q6-K6-E12.pep
TVLRSPSPEDLVSVLQVVVTLAFGSDTVAQKMLCNDIMKSLEILFGHKNPEVQRLALLSVGNLAFCRENYNILVTSENLRELLMRLTATPEPRVNKAAARALAILGENESLRRAIKGRQVPKTGIRILSLDGGGMKGLATVQILQEIERGTGKRMHELFDLICGTSTGGIFASALGIKLMSSDQ

SEQ ID NO: 109550 - protein, 75 aa, Gossypium hirsutum
  Clone ID: LIB3829-032-Q6-K6-G11.pep
IFINNSRSTIYNHVQLNFQQGKNIIFNFKNILLLTNLPRIRSWQIGSITLKLSTFLDLTSISFFLDMQYQELAEC

SEQ ID NO: 109551 - protein, 192 aa, Gossypium hirsutum
  unsure (1)..(192): unsure at all Xaa locations
  Clone ID: LIB3829-032-Q6-K6-G7.pep
VEKTRFSKEEKKTTPRKEHRRSLDLANRRSNDSPAKKTSKKIAQKSLIEAFISPNEDDLPNISEESIDFSSISAVSDTNFNFETTESIAITSNPLLSSSSETFISSEIGPYSKISAANRDEPIDFSKTGLAEVEIFLDLLKQARFQVLNSAHVENKSXKVLDALIEFTIKEFYAMPQEIDKLQELVSRNAYV

SEQ ID NO: 109552 - protein, 163 aa, Gossypium hirsutum
  Clone ID: LIB3829-032-Q6-K6-H11.pep
MLIENQNLSHPVPDHPDPITSNMSKINANWNPHPANILTQAGTGSSNEKLKLESKHSAEQLTSTSECNEEKLVASTVNTTMSNQLSFPTQPQIPLHVQNNPWSIQSQLDSSVLQAHQMLVSQADISTLNSFLPFSDTDEWTSNLSSCQPLSGAYKSPGPIPMV

SEQ ID NO: 109553 - protein, 117 aa, Gossypium hirsutum
  Clone ID: LIB3829-032-Q6-N6-B10.pep
QRSIVSFELMTLEQAETGADEYSVTSKPFEVSDGQTKDFGIKLRRGRRLKDFQKDILPGLASLSRHEICEDKNILEGVLRSREYKKMRAKMAIGENWCTPVRSRQSRLNYVGRKTFR

SEQ ID NO: 109554 - protein, 83 aa, Gossypium hirsutum
  Clone ID: LIB3829-032-Q6-N6-B11.pep
CSTGAGPRIVCVADSPLELRQQALEFVNLSPRTPNTPSPYLTPRTPGTPTTPSAYRRPNNLPPIATRPTLNDSNTDATPGIQA

SEQ ID NO: 109555 - protein, 82 aa, Gossypium hirsutum
  Clone ID: LIB3829-032-Q6-N6-B8.pep
SKEFDDFRAKLAGLTSVTKNYFENLVRALENGLADVDSQAAAACSKTTSSKNTGGTSKTRGGRGKGSSKSGGSGRNVDDTSN

SEQ ID NO: 109556 - protein, 121 aa, Gossypium hirsutum
  unsure (1)..(121): unsure at all Xaa locations
  Clone ID: LIB3829-032-Q6-N6-D11.pep
CRIIDRGMSPAIEVDSGDECDXPPSGASPEASPRWKMTPTAARRPRGGTRNNISGLAFCLSPLMRPSPNTHWNQKGGLPPDMSFSGEARPSTKKPHLASAAGFHANRSRKLADFGRVNRNR

SEQ ID NO: 109557 - protein, 53 aa, Gossypium hirsutum
  Clone ID: LIB3829-032-Q6-N6-D9.pep
RSFSVDGWLCRPYLYTSSCRRQELPIEKVEQLWKEHWFWKRLWEMKLMTVFTS

SEQ ID NO: 109558 - protein, 54 aa, Gossypium hirsutum
  Clone ID: LIB3829-032-Q6-N6-F12.pep
GAIKWNKIVVLWYPRYSLIGLAPYYDYLQSIWPAIFIVLNFPSELIRSIPNRLC

SEQ ID NO: 109559 - protein, 42 aa, Gossypium hirsutum
  Clone ID: LIB3829-033-Q1-N6-B10.pep
LATLVIKKTYPYAKICPSAAHFPSFYHPLRLIQYPLALDLAQ

SEQ ID NO: 109560 - protein, 89 aa, Gossypium hirsutum
  Clone ID: LIB3829-033-Q1-N6-B12.pep
QFEKSRDFYNALKVLCGRSLQKQGSRLSADYEVTWAKDGFFRNSRSQNQEKSSKMQEPAAVRYRSEASRRDPHVSEFPSNDTRTKRFKE

SEQ ID NO: 109561 - protein, 135 aa, Gossypium hirsutum
  Clone ID: LIB3829-033-Q1-N6-B7.pep
PPQVATPPQKFFFRPGPVKKEKKRWGFPSFSPVVNKTMVFPLEQNRGFFPPGLVLQAPPFPQIPHTGPFFGKFGFPLLKLVQSPQTFFFTPFFFLGFQTLPFFFFSTPFFLFKLCPFFVNPFFKNQSPLFFFGDP

SEQ ID NO: 109562 - protein, 85 aa, Gossypium hirsutum
  unsure (1)..(85): unsure at all Xaa locations
  Clone ID: LIB3829-033-Q1-N6-B8.pep
QTGKHMGFSNVSDLPPSDTVVLSQDNLKAKPVIVMYVKLQNGRSLTIFIEDNQTGXKLQRISNTLGMGSTXETTDMIGXKKIEDH

SEQ ID NO: 109563 - protein, 90 aa, Gossypium hirsutum
  Clone ID: LIB3829-033-Q1-N6-C10.pep
RIAHAKSDKSEEEYTSSYLKLRLSEAEAEKKYLFEKIKLQESSHTSQSSNGGDPSQILTYAKIRDLLHGYNIPSKTYSHPNERHNFRTNP

SEQ ID NO: 109564 - protein, 118 aa, Gossypium hirsutum
  unsure (1)..(118): unsure at all Xaa locations
  Clone ID: LIB3829-033-Q1-N6-C9.pep
GEFGRLCAPMKKLEKRFKDSGLSKNAEFCAQLQFSIVRALALFLAGMDFFVAVGLFLLAPKKVPPXVTGAFGFVSSFISCYQLLPSPPRFKPPLSWKPVFPPRLEYFFRLNNFFDLGL

SEQ ID NO: 109565 - protein, 102 aa, Gossypium hirsutum
  Clone ID: LIB3829-033-Q1-N6-D12.pep
IQLLSSSQDICREDILHHHQLKTNTPEFGLAATTTVSLPFDTRESDLKESCSLDASTMRREQSNSVLLKNLDHDLILSPHHTRKQAGRSDTGDEIGIDTPNF

SEQ ID NO: 109566 - protein, 91 aa, Gossypium hirsutum
  Clone ID: LIB3829-033-Q1-N6-D8.pep
FVKFGVNVYLSQQGCFSYALQDNVAYIGNPGLIKENSRLGSGNGRYRIRTEMTDGFLLHRLGSLEMVTYFVTSAGEIVNKIVVQQRGRQVM

SEQ ID NO: 109567 - protein, 174 aa, Gossypium hirsutum
  unsure (1)..(174): unsure at all Xaa locations
  Clone ID: LIB3829-033-Q1-N6-F8.pep
FRTMSTSHSTWPVLLIPYNLEPWACMKQSSMILSMVIPGEKGPGNDIDVYMQPLIKELKQLWIGIDAFDSSVFEXFHLACLLWTINDFPAYANLSGWSTKGRVACPICVEKTESRWLQYGQKFCYMGHRRWLSTEHPFXKQSREFDGTIEYEVAPIPRFGEVILREVEGVNFIY

SEQ ID NO: 109568 - protein, 58 aa, Gossypium hirsutum
  Clone ID: LIB3829-033-Q1-N6-G8.pep
GGKTIINVRRLQRFSNTVGMDQRQETTDMIGVNEYRRAKILERAQTIKQGPGRTLERL

SEQ ID NO: 109569 - protein, 87 aa, Gossypium hirsutum
  Clone ID: LIB3829-033-Q1-N6-G9.pep
RMVDPLLQGQYPVRGLYQALAIAAMCVQEQPNMRPAITDVVMALNYLASQKYDPDNPVQSSRKSKSSAATNGDDDKKPVAEHELNSD

SEQ ID NO: 109570 - protein, 95 aa, Gossypium hirsutum
  Clone ID: LIB3829-034-Q1-N6-A11.pep
IKKLKAEKNELCAEKQRLKAKKKRQEQHLKAMNAQPSFMPPAPSAIPVAFVGAPGQAPGNKLGPPIGYPGVAMWQFIPPAPVDTSQDHVLPPPVA

SEQ ID NO: 109571 - protein, 109 aa, Gossypium hirsutum
  Clone ID: LIB3829-034-Q1-N6-A8.pep
NNDSVLANPRRANPSIFGDLCKSSIPALGGNIGLGGVYFHIPNNIRLPKSFTIIFQFRGKNFCFFKGDGHIKNPNSFSLGGLKNLGGIFGLELVLGNPRVVRFIKNDLG

SEQ ID NO: 109572 - protein, 77 aa, Gossypium hirsutum
  Clone ID: LIB3829-034-Q1-N6-C7.pep
TCTSVLHGATYSLVAGILESCWMDPNLCQTLYPSLLSSLGNLETHFVTLTVIRHVWMKRHIRPFQVSTASSILCQII

SEQ ID NO: 109573 - protein, 104 aa, Gossypium hirsutum
  unsure (1)..(104): unsure at all Xaa locations
  Clone ID: LIB3829-034-Q1-N6-D12.pep
PQLQQQQQQQPQQQQPLPHLQQQQLPQLQQQQQQQQQLSQMQQQQMPQLQQQPQLAQMPQQQQQMVGSGINSAYVQGXGRSQLVSQGQVSSQAPSNMPGGGFMS

SEQ ID NO: 109574 - protein, 75 aa, Gossypium hirsutum
  Clone ID: LIB3829-034-Q1-N6-E11.pep
RFVRPGLGAGLSRVWFCVSVFFGFFFCFLFFFFFFFFFFFFFFFFFNIHKKDFYNPTLVPKRPPPLNNYYSTLLS

SEQ ID NO: 109575 - protein, 106 aa, Gossypium hirsutum
  Clone ID: LIB3829-034-Q1-N6-G12.pep
KLDGRFPLTDGWIDAWTELRPAEDGWTYDPKSNQMLSANRTLRKRLDRFLCKLNGFKVCAVQMIGVEPIPGLSYPKEKNVRKEKKLLELPVLPSDHYGLLFTISSQ

SEQ ID NO: 109576 - protein, 121 aa, Gossypium hirsutum
  Clone ID: LIB3829-034-Q1-N6-G8.pep
VWLPRFAPRAPYGGTKGPRFGGGGFGGGFSEGKVPLVRIWFSPVEEGIVVVDMGFLLPILVGDLPPGWQVLGFRSPFILDYLFACLFWVYIYSPPPIWGIFFSNSLCIWFLPWDFFFWGPP

SEQ ID NO: 109577 - protein, 95 aa, Gossypium hirsutum
  Clone ID: LIB3829-035-Q1-N6-A11.pep
VNKLLPCRFSLVQEFYDKLPFHCKLQNSQIRRHTYVQLLIPQIDQLKLIFILSVFIHKLLKNQIQAQFLASISEVKNCDPCEISLSTLTLFMVLA

SEQ ID NO: 109578 - protein, 58 aa, Gossypium hirsutum
  Clone ID: LIB3829-035-Q1-N6-A8.pep
AYDVGSSGFGSLLSMGHSSGKKDRLCMKGPGGCGEVEVAVSGVVGLVISLTSRGLLNC

SEQ ID NO: 109579 - protein, 39 aa, Gossypium hirsutum
  unsure (1)..(39): unsure at all Xaa locations
  Clone ID: LIB3829-035-Q1-N6-C7.pep
CILLYSLRCVVXXSWCNFLVSGHLDRSSPVFIVIDENGL

SEQ ID NO: 109580 - protein, 48 aa, Gossypium hirsutum
  Clone ID: LIB3829-035-Q1-N6-C8.pep
LGKPYISILYYELELSFVHRCTFMCRKITYHSITSAALAICRCIGFIC

SEQ ID NO: 109581 - protein, 72 aa, Gossypium hirsutum
  Clone ID: LIB3829-035-Q1-N6-C9.pep
KLIAPVGVWFLRFFLEKAGEREGFPFWWLFISPVFCYCYEDDWFPPSFYPFWSVGLVGWSGNGSLKCFGILF

SEQ ID NO: 109582 - protein, 60 aa, Gossypium hirsutum
  Clone ID: LIB3829-035-Q1-N6-D9.pep
FKVSALNQHVNSIHVEMHAFAKLNIFKFIYIIMLFKTLSSFSTIGTLKTNVNMFKHDITI

SEQ ID NO: 109583 - protein, 116 aa, Gossypium hirsutum
  Clone ID: LIB3829-035-Q1-N6-E11.pep
PEMTISFIHSNPSPCSLNELDASPFSPPCLIHFSWKPCARRAVELVLTSSSLISPSKTSYASPLKVKYQSSHAQLCTFQDHQLRADHQWVFLCPLQPILAVHLSAAFLLFVEHKLH

SEQ ID NO: 109584 - protein, 68 aa, Gossypium hirsutum
  Clone ID: LIB3829-035-Q1-N6-F10.pep
FFLSSNAVLTCYYSSFSAGKHVHHQQDTVLSCGQRRELEKGKIERTDLEGVNSLTYLVRVPFGLYMYN

SEQ ID NO: 109585 - protein, 84 aa, Gossypium hirsutum
  Clone ID: LIB3829-035-Q1-N6-F11.pep
VENLYIVALSQGCLRPPFSFVPFAGSVKASDVKGYFLRLFCQHLLPFFDNAKHLCAFYFFGLLGAFGLYVKFVFVYSRKKVHEF

SEQ ID NO: 109586 - protein, 142 aa, Gossypium hirsutum
  Clone ID: LIB3829-035-Q1-N6-F12.pep
TGPPFSPTKPHRGGAPSLNLGIPPLMSPTSQPPSTRGLTNIKDPASYFGQNQKPRGFLIKPPDFPPLKRGGVPNKPFKNKNLKGAGATVSGGPPPRGGASLPIGRNPADMLGPNPYHNPRMQDSSWEPQGINHQGGGGPLLG

SEQ ID NO: 109587 - protein, 82 aa, Gossypium hirsutum
  Clone ID: LIB3829-035-Q1-N6-H7.pep
LLIWKQKSTKVPSNFVAEHAKSIPANQLLCISHYLSFKTKSFNHLQSTSRCRIKINLLIESAYWQVNCTADQVIRQILFLFW

SEQ ID NO: 109588 - protein, 57 aa, Gossypium hirsutum
  Clone ID: LIB3829-036-Q1-N6-A11.pep
LNWAQGVLHQISFPNHYGPKCLIGASNDQKCSNSKIIYFKRNKAPPPKHRNGDGWHQ

SEQ ID NO: 109589 - protein, 121 aa, Gossypium hirsutum
  Clone ID: LIB3829-036-Q1-N6-C12.pep
KQERKGVSLYPRPQGKWHLITKHPFKFFFKKNGNWVISTGPRGIYKWRTNPLFELTILGKHKRGSPGPAFKGAKKKILVTGTGQAPNLAFGGHLILNFDGPTPKRGGEVSCPLGGNPQQGG

SEQ ID NO: 109590 - protein, 75 aa, Gossypium hirsutum
  Clone ID: LIB3829-036-Q1-N6-C7.pep
ALLDSELWVNTPQNFVFFFRTLLQFLTVGCFLNIRGIFSLLYNMGLVGAFHLEPPPFNPKVCLTNDIKTRPRLRC

SEQ ID NO: 109591 - protein, 86 aa, Gossypium hirsutum
  Clone ID: LIB3829-036-Q1-N6-D7.pep
NLDPYGGNGGSPYKGKKGGLKRGGNLGPFFKNPTWAPGKGFGKGGGIPKAPLEGGGGPQILKRGGPWGPINRGGGGGTQKGPQQKG

SEQ ID NO: 109592 - protein, 70 aa, Gossypium hirsutum
  Clone ID: LIB3829-036-Q1-N6-E9.pep
KKKGPFFNNPKIKFLVFSGNGSKRVVFFQCWVLMYFFKVFFLALSLLKWGGFASFLFGPPAPKKSFFFSF

SEQ ID NO: 109593 - protein, 88 aa, Gossypium hirsutum
  Clone ID: LIB3829-036-Q1-N6-G8.pep
IGSKKVFSGVVFQAHDSFSWSVARKRSNSGSRLQSFDEVGPLLERTSRSSLMGKSRGLKHIFRWDQIYCYCSQRGFYGSSPGFHGVYP

SEQ ID NO: 109594 - protein, 82 aa, Gossypium hirsutum
  Clone ID: LIB3829-036-Q1-N6-G9.pep
LKTTLLLSTGICTCIQNSIERHPHITRTKGRWPDSGIKRGGMELLRSNPELQRRTQETARFYFKPPIERSVKPNSRDHAAQN

SEQ ID NO: 109595 - protein, 90 aa, Gossypium hirsutum
  Clone ID: LIB3829-036-Q1-N6-H9.pep
RKMGIFFLKTRKKKPSRGGALLGLPLLGPFFKGSPWPLVKGFFFTLVKQGKNMVGLFGWGGGFRQLQQCLVGKGNFQLLGEREIFLGLFF

SEQ ID NO: 109596 - protein, 95 aa, Gossypium hirsutum
  Clone ID: LIB3825-023-Q6-N6-A11.pep
NTFINLARTVQTHGPWSSAWVGESGGAYNSGGPHVSDTFVNSFWYLDQLGMASKYHTKVYCRQTLIGGNYGLLNATTYVPNPDYYRTDQIYGKTF

SEQ ID NO: 109597 - protein, 104 aa, Gossypium hirsutum
  Clone ID: LIB3825-023-Q6-N6-A4.pep
DIQQIQNPYEPYQGNQVPVITQVSQADLNQFSANPGLPNLWQIDNNVSDSKGFLPTTMQNINGYNHGFNLGDQNLQQVCTFLRKYQIWCLLDRFYPHHLQARLL

SEQ ID NO: 109598 - protein, 158 aa, Gossypium hirsutum
  unsure (1)..(158): unsure at all Xaa locations
  Clone ID: LIB3825-023-Q6-N6-A7.pep
FFFFFFFFFLFFFFLFFLFFLFFSFSFFFFQPEKKKKKKKKPPKKKKKKKKKTKKTKTPKKPPNNFTPPPPQKPTKKGPPPPPKVRPPHQKKKNGAPPTPQIGKKPRNGKPPVXPPPPTRRQTTPPYSPPKNSPAQPRAQPSPKRNCFSVTSPQNKPT

SEQ ID NO: 109599 - protein, 120 aa, Gossypium hirsutum
  Clone ID: LIB3825-023-Q6-N6-B2.pep
ECIDQWLRLNVKCPRCRCSVFPNLDLSALSNLRSADSERSSASIVTTTQYVRTQPLSQSYLLRLQGLLRPVRTGNAGAPSDADVALDTAENGAFNVATQDSTGREAVGHALGGLSTPPHH

SEQ ID NO: 109600 - protein, 50 aa, Gossypium hirsutum
  Clone ID: LIB3825-023-Q6-N6-C1.pep
GKGGFLFFPFFPPSGGEVLSNIFPKVGKRSLTPSYIPRDFQGQGFIFPNF

SEQ ID NO: 109601 - protein, 58 aa, Gossypium hirsutum
  Clone ID: LIB3825-023-Q6-N6-C6.pep
RPEINEKPRPATQIYKCKVLLGFGRWVELVCLAWLKYEIAFENLLTAIVSDFTIPSIV

SEQ ID NO: 109602 - protein, 87 aa, Gossypium hirsutum
  Clone ID: LIB3825-023-Q6-N6-D3.pep
KKGKFCWAKCPPVNKMNFQILASFAQPQTFGNPFNKKKFFPFPKNNLYPPWIFPLKKKFSVNPFKTKNGGFFFETRFGGPPHFFYFL

SEQ ID NO: 109603 - protein, 46 aa, Gossypium hirsutum
  Clone ID: LIB3825-023-Q6-N6-E8.pep
SKGYCSQFSARSLITSGFSSSHLGIAGTPTGYGPEIVGRVFATDRS

SEQ ID NO: 109604 - protein, 43 aa, Gossypium hirsutum
  Clone ID: LIB3825-023-Q6-N6-G12.pep
IHDAMTCISSLFSMLPAIVELLFHMLPLPMSYGLCPPRASVVG

SEQ ID NO: 109605 - protein, 100 aa, Gossypium hirsutum
  Clone ID: LIB3825-023-Q6-N6-G2.pep
FRVFGQEMAEIPLVAPSTESQGQGYFQCLFSCIEKLLGFLKVKTLVLPAADEAESIWAKKFRFSKITQEELNEYRRGSQMMIFQGTSILQKPVPSVRLIG

SEQ ID NO: 109606 - protein, 61 aa, Gossypium hirsutum
  Clone ID: LIB3825-023-Q6-N6-H10.pep
LTIIKGEVCSGEVMFSQYGNGGNKKQPGNKGNEKEDGNNDGLMEDSDEDDKSDTEEDMEES

SEQ ID NO: 109607 - protein, 90 aa, Gossypium hirsutum
  unsure (1)..(90): unsure at all Xaa locations
  Clone ID: LIB3825-023-Q6-N6-H5.pep
VCMAMGVANLLXWGVWAGITSHPSRWKVWLFNVGGTIALLLEIYDFPPYKGFIDAHALWHAANIPLAYICWSFVRDDAVFRTSTLLNKTK

SEQ ID NO: 109608 - protein, 105 aa, Gossypium hirsutum
  Clone ID: LIB3825-023-Q6-N6-H9.pep
DIIRLDEASLSASTPEVLPMIAPPTQGVSLFQGGANRRIRLPRTKADIIQHGIGGISPKKWKSEEPPKCLLSVFSPRTAILVILITLLALLLPCSNFKSSKVFQI

SEQ ID NO: 109609 - protein, 78 aa, Gossypium hirsutum
  Clone ID: LIB3825-024-Q6-N6-B8.pep
TFCTNSTPVHLFEPPKFTKKYTTLVQLSVFHFCTEGSRYQNTFVSTAAYATIIVSEFYFFPSVLENPCKRMACQQSCI

SEQ ID NO: 109610 - protein, 89 aa, Gossypium hirsutum
  Clone ID: LIB3825-024-Q6-N6-C2.pep
VRKRLIKLLIRNEKLSSHSIELGCPGSDMSLGKINMKLKIMGVLIQYSQIKRELVYGRFSKNRKLGILSSVFFVEKFQYMLDMSDTQPE

SEQ ID NO: 109611 - protein, 109 aa, Gossypium hirsutum
  Clone ID: LIB3825-024-Q6-N6-D11.pep
AQCLNQISAKANPSLMLAPQPDNTSVRSSISATPAPPYASTPRTLATHTCTCKKDERTAKQRTNIVFFIYFFSFFLFGYKAKIFNLCKGLRNIDTLRIRNDQIEKSKER

SEQ ID NO: 109612 - protein, 56 aa, Gossypium hirsutum
  Clone ID: LIB3825-024-Q6-N6-D9.pep
RSTNYFSIRKASFLFVRNSEKLYGINHKGTNIYKPISKMLPKIPCQKLTAACLLTF

SEQ ID NO: 109613 - protein, 101 aa, Gossypium hirsutum
  Clone ID: LIB3825-024-Q6-N6-E1.pep
IVKTMQYIYLYSRKLQYHSNSKNVKLLHDQRGAGYILSRFSSLLRLFYRSLQFLLLPPNSMTKQKLKRNIALPPRPKLRKKTKITTHKFTLITFVSITVKS

SEQ ID NO: 109614 - protein, 85 aa, Gossypium hirsutum
  Clone ID: LIB3825-024-Q6-N6-F3.pep
HITYFKYERTTKIFLQLSIKKLWQLNLPAKIKITNWRVFQNLISTFNNLHYRKIVGSITCPRCSNGVEKLRTYFPRLLQCKGNIA

SEQ ID NO: 109615 - protein, 142 aa, Gossypium hirsutum
  Clone ID: LIB3825-024-Q6-N6-G12.pep
VVPIEFVAETKDRGMLATWCPEEQVLNHPSIGGFLTHSGWNSTIESISGGVPMTCWPFFAEQQTNCWYSCTKWGIGMEIDNNVKRDKVESRVRELIKGEKSKDMKKKAVEWERKAKAATVKADGSSYMNLDKIIQLLCTPRA

SEQ ID NO: 109616 - protein, 57 aa, Gossypium hirsutum
  Clone ID: LIB3825-024-Q6-N6-G3.pep
VALVLKALYGNYILEEEFIMEWYQKGVAGGNKSSQIWKYSKPFIEWLQNAESEPEEE

SEQ ID NO: 109617 - protein, 56 aa, Gossypium hirsutum
  Clone ID: LIB3825-024-Q6-N6-H10.pep
MADSGGSSGSLLTVAFQILVDSVPTAKLSLGSVATVNNLIACTVERIKASLSCDNA

SEQ ID NO: 109618 - protein, 96 aa, Gossypium hirsutum
  unsure (1)..(96): unsure at all Xaa locations
  Clone ID: LIB3825-024-Q6-N6-H11.pep
AVTEAIWAEHVLGSDTPVLVEFWAPWXEPFRKIEPVCANLALVYAVMIACSKLVTDISPNIATEFGIRSIPTICFSRMGRRNXSIYGAVPKCHLGR

SEQ ID NO: 109619 - protein, 168 aa, Gossypium hirsutum
  unsure (1)..(168): unsure at all Xaa locations
  Clone ID: LIB3825-025-Q6-N6-A1.pep
VRWKRYSNVCRSVVEHDPNWLQEVSNVXFIVTGAQLISKGKWPKTVLHLRLLYTHIPNCTIRKTEWAAPPETSRKAGFLTNLSTTFSFTQRAVTGQQKPPPTTLNSGVFPEGPPAPIRAKKLLKYVDVSEVIRGPHDAPGHWLVTAAKLVNEGGKISLHVKFALLDYP

SEQ ID NO: 109620 - protein, 140 aa, Gossypium hirsutum
  Clone ID: LIB3825-025-Q6-N6-A12.pep
SKGRREARGGGERIPSPPQKRSNKGANKAPGAGASFQAGAKTGGVFETRPPTPLRSRLSLENRRDIGDPPIWEPPPGGEKPLTAPGKTIGGEFMGIIPMGPSGAIFWAGGCYCIKGARACFSFIGRNFGGAFPNGTSSGG

SEQ ID NO: 109621 - protein, 96 aa, Gossypium hirsutum
  Clone ID: LIB3825-025-Q6-N6-A3.pep
SAELSKNQINDVRAELGKLKQDAAKKDSLIKSIQLQLSDAKEQVLRGRLMLRKRLGFPRWSRNLLVKLFNAKQRGSPPLSHKRNFGKGKEGQSLIF

SEQ ID NO: 109622 - protein, 111 aa, Gossypium hirsutum
  Clone ID: LIB3825-025-Q6-N6-A5.pep
FLTALTDKKILGDFLNGFSIFLSLLQLPSWQCLVLHLLCFTIKDRHFKTILAFDALFRLGYESLSFNLILLYDYDYSASLLKSTRWTELRVWIGSKNKFILLSKSDLILKR

SEQ ID NO: 109623 - protein, 73 aa, Gossypium hirsutum
  Clone ID: LIB3825-025-Q6-N6-B1.pep
WTKRPGCVWMAGWLTQILKSSSRFCFLRALKRNLYIILFIISILITSPLYFMFNNVYQILSQLKLYNKNFYVM

SEQ ID NO: 109624 - protein, 64 aa, Gossypium hirsutum
  Clone ID: LIB3825-025-Q6-N6-B2.pep
QKAETGKYKGAAPKGEGQGGPPGKKPGTKPPLGKNPNNLLLLLLQHPKKIGHMRLAQNRRQGRG

SEQ ID NO: 109625 - protein, 113 aa, Gossypium hirsutum
  Clone ID: LIB3825-025-Q6-N6-B3.pep
VQFLLTAPEIYRDYRSITAKNFLIAVKNYLEKHDKRSPMLSGTVTCKRDKTVKELIQTLDSEKIHRMYVVDDDGNLEGVITLRDIISRLVHEPHGYFGDFFDGVLPLPENCRV

SEQ ID NO: 109626 - protein, 149 aa, Gossypium hirsutum
  Clone ID: LIB3825-025-Q6-N6-B5.pep
ERMFPNQLVGNAKDELSFRTLIRDFKTKFPLLQIVLVNPNSWGCFGYCLGPTSAGEFILKLDLLPIIKVVFSDWGETPAFQPRGHEDWITRNVADVVCMFARPLDELIQSLSSAKDILPPSNNFFQGLPPFPPAPVEMIGWGNFWSARS

SEQ ID NO: 109627 - protein, 110 aa, Gossypium hirsutum
  Clone ID: LIB3825-025-Q6-N6-B8.pep
MTDQLENKERKGQITPNEDKKGSGTVTDMESGKNKLEGHGYTWTYDPLTNLPIEFYHYYHGSNSDMGTLIEIRRTWDAYIRPGGSRIPSHWVQPPPPADDIWASYLVRPK

SEQ ID NO: 109628 - protein, 71 aa, Gossypium hirsutum
  Clone ID: LIB3825-025-Q6-N6-C1.pep
NPPPPPREKKKGPPPLFPPPPPQKGLNHPPKGFPIKRKPFFKPKKKKKKKKNHKKKKKKKPPKKKKKPHPP

SEQ ID NO: 109629 - protein, 75 aa, Gossypium hirsutum
  Clone ID: LIB3825-025-Q6-N6-C10.pep
LKGKLPGGGLRPKPNLGGPWPLPRFPWLWAPSRLPRIPKTLKITFFPVGSKGEVFTVLSNCEFLHCLGVFMFFQF

SEQ ID NO: 109630 - protein, 62 aa, Gossypium hirsutum
  Clone ID: LIB3825-025-Q6-N6-D3.pep
IVLSLVTPAYTLYASRFVLFSVIVSRLHFPHQEPRLCSMLYFLFATQLSVLFSTYTLSGPDI

SEQ ID NO: 109631 - protein, 63 aa, Gossypium hirsutum
  Clone ID: LIB3825-025-Q6-N6-D9.pep
NLSLPVTDIISPGYELVIAREGMPIAKETGNRGDLRIKFEVKFPTKLPPEQREGLKRALVGVK

SEQ ID NO: 109632 - protein, 74 aa, Gossypium hirsutum
  Clone ID: LIB3825-025-Q6-N6-E5.pep
GPKRGGGGNGKNGEKGVPFSYRKNQPKKKGGGTGIFLKNKITFYQENPNWGPQLNKGPFHNKFKTKQSPKSPSS

SEQ ID NO: 109633 - protein, 108 aa, Gossypium hirsutum
  Clone ID: LIB3825-025-Q6-N6-E8.pep
KLANAVAAGTILAARQVRMKLVKDWLPVLLVCKDNVSPMLPSHKPLHLELEETFLRIISTLPMSDAQVLLQQCLSFSTRNVEDCPHLITAFNTWFRRATRPPQLENLD

SEQ ID NO: 109634 - protein, 57 aa, Gossypium hirsutum
  Clone ID: LIB3825-025-Q6-N6-F1.pep
PLILKQRGRFPQFFKEKWEPPPPQKRGMVSNWPLFGGPKSQDPLGAKISPILKTPRG

SEQ ID NO: 109635 - protein, 148 aa, Gossypium hirsutum
  Clone ID: LIB3825-025-Q6-N6-F2.pep
PVIDVCSSGQGYLVSAGPTISSSIPPLHPNLVNPLLPDTTDSVVEKGARETLRLLISGSTHSNPPLIDVLPAVDKKSILVTGSRGLYSGTRDISALASGIATVSFATLSSTSMSDSFTKHPDSKQVGSSDSEGACSSSDAKLLDSERS

SEQ ID NO: 109636 - protein, 47 aa, Gossypium hirsutum
  Clone ID: LIB3825-025-Q6-N6-F5.pep
SAFTTGGIHATELGLDSFGQVADISSVKALAAKYDAYPTYVLPAFAW

SEQ ID NO: 109637 - protein, 88 aa, Gossypium hirsutum
  Clone ID: LIB3825-025-Q6-N6-F7.pep
SPVLVPAGITIFLVTMGFLFSAGFGVAGLTGLWGISNSGQGNPPPGAGQLVYPKTKLASSARVFPKKAKEYGPFVPHKAQKVTQGPAF

SEQ ID NO: 109638 - protein, 128 aa, Gossypium hirsutum
  Clone ID: LIB3825-025-Q6-N6-H10.pep
QPGQIESAVKWACRKRARNQPVYVHRAYVSKLKRLLDPGSIGHGRSVAVMCALLVALGVVENWKAAEKYIRERRPCIKMNSLHYKALEEWSSSRLSSPKRNEELDVNSVSQSNSSGNTKASMVENKID

SEQ ID NO: 109639 - protein, 107 aa, Gossypium hirsutum
  Clone ID: LIB3825-025-Q6-N6-H2.pep
LIYPGGCRIILRRLSPGPTGWLLYTPAVSFPPCINQTGGPTPLLPVIVYPAPNSLSPHISQTGPCLIMLLLGPPVFFPHQIPGLCWGFLKRLTSGPIFFLTKMFSCF

SEQ ID NO: 109640 - protein, 109 aa, Gossypium hirsutum
  Clone ID: LIB3825-025-Q6-N6-H8.pep
VFGFRRCGGFFAPDVGRSSFNLFFLRKEKLLQGFRWLTLGRVFFETCLEERPGNGFQKTPGVGGGDFCLLPPPFLEGPVLLSLCPWGGVKFRGQLFGGKGTNPRGGLGP

SEQ ID NO: 109641 - protein, 92 aa, Gossypium hirsutum
  Clone ID: LIB3825-026-Q6-N6-A8.pep
QYLSCTHNYSVKYKIIADKTSCVQKCCLNSIVHISPQTNNTWCLQIIFPTWNLRNCVLKCQICTCTLTYPNLDNIISKRNQWNAGMAAYILF

SEQ ID NO: 109642 - protein, 98 aa, Gossypium hirsutum
  Clone ID: LIB3825-026-Q6-N6-D2.pep
KRSWAGNLVSHCLTVSGVRDELSSILWPYPCHELKGSPALLFRLGLMVVVGIILESFSTKGFEHVKSRFCFKGCKVRSSTHRREIFYVERRLQECPPQ

SEQ ID NO: 109643 - protein, 62 aa, Gossypium hirsutum
  Clone ID: LIB3825-026-Q6-N6-D6.pep
PQQDNRTMVLHFGKKQPRRGVYSRERGAKTKPENDLGLKVSTEKLVGKVGELWTALGGRRLG

SEQ ID NO: 109644 - protein, 63 aa, Gossypium hirsutum
  Clone ID: LIB3825-026-Q6-N6-E10.pep
HTLLSKGELNCYIEPMETNSVFICCLFEEEFWERTQQQELISGDCLSNGYTTWWARHCDSVHS

SEQ ID NO: 109645 - protein, 104 aa, Gossypium hirsutum
  unsure (1)..(104): unsure at all Xaa locations
  Clone ID: LIB3825-026-Q6-N6-E3.pep
VPLMEELVARKKFLKCVSNLDSNELGLLLTFLSKNAPMPRYFSLLMGLPKKVIXNEGXNIRNSDPLKGHIKTLNRSFEEDLRIPPSFQEIQGIISPLLRIAGRR

SEQ ID NO: 109646 - protein, 51 aa, Gossypium hirsutum
  Clone ID: LIB3825-026-Q6-N6-G11.pep
HKHFISVYSTLGVLSSCNISSISKEPIGDNPKHNKMMSKLNPYCDKDSNSF

SEQ ID NO: 109647 - protein, 51 aa, Gossypium hirsutum
  Clone ID: LIB3825-026-Q6-N6-G12.pep
KQNGKPFIQRINFITINLTKKEGGHKSLPPSLFLKKSPPGGGAQQALQFNA

SEQ ID NO: 109648 - protein, 89 aa, Gossypium hirsutum
  unsure (1)..(89): unsure at all Xaa locations
  Clone ID: LIB3825-026-Q6-N6-G3.pep
GGAKKYGHICIHQRNGCKSLTLFQGFKKKFSFTKIFXTLKKEFFFNGPVVQAPYFGRVFYLQGAPGKNFSPFLFXGGIVKKETLQIPGF

SEQ ID NO: 109649 - protein, 123 aa, Gossypium hirsutum
  unsure (1)..(123): unsure at all Xaa locations
  Clone ID: LIB3825-026-Q6-N6-H5.pep
QTTVSRSSVEAEYRSMVVVVAEVVWLNGLLKEISLNQPAKSVVFSDSKVALQIAANPVFHXRTKHIKVDCDFVRDKIKDGLIQMQHVGTTEQLVDLMTKALGVKQHEYLVSKLGVKDIYQPST

SEQ ID NO: 109650 - protein, 66 aa, Gossypium hirsutum
  Clone ID: LIB3825-031-Q6-N6-A11.pep
TPTNPAFPLQKKVQTREGYRPKLGHSKRKTKMFFPSPQFKTSLTHFSRFWKKKNLTRLKNGSHNHC

SEQ ID NO: 109651 - protein, 110 aa, Gossypium hirsutum
  Clone ID: LIB3825-031-Q6-N6-A12.pep
PNPNLKTPGKNLWFFFTQTQKKAPKGGKLGPPNGAHKGGKKRFFPLGGALKGPPPQVLWGKPCFPKGEEGFLGKNPPLKVSQPKKKAGKPFKPRGGRGEPLLGDLTKDFF

SEQ ID NO: 109652 - protein, 79 aa, Gossypium hirsutum
  Clone ID: LIB3825-031-Q6-N6-A2.pep
SEGVSFFIKNFSTRSFGLHFFFRNPRTFTYFGLNKLANFGRTKTLWEKDFDHFFRRVLEKIFCKTGWSKRTCVGQPPFL

SEQ ID NO: 109653 - protein, 50 aa, Gossypium hirsutum
  Clone ID: LIB3825-031-Q6-N6-A9.pep
PPMNKIRAMPRVASEGVFCGANFKVDVSPKVNSLPRVGSAPNWVDPWVSP

SEQ ID NO: 109654 - protein, 85 aa, Gossypium hirsutum
  Clone ID: LIB3825-031-Q6-N6-B10.pep
GVLKNGLPPLPQRALSRGSFGGGRGGFGDKNGGGSRFFGGKGGGRGGFSVRRNGGGGGLFNSKRWWVNSLASAHVFRVLGGSGPP

SEQ ID NO: 109655 - protein, 146 aa, Gossypium hirsutum
  Clone ID: LIB3825-031-Q6-N6-B11.pep
FPGGFPRGAPPRGALSGFPGLGSVFGPPLWPFFGFLKFGCPFRHPPPPVGARSCPGSGPVSSAGPSGCQFNFPLGFFSALLWGFFLAAGLPPPLGLFGVSAGGARRAVPGLYRSAVSLEKKEKKPKKKKKKKKKGRRLGSKLRRGC

SEQ ID NO: 109656 - protein, 80 aa, Gossypium hirsutum
  Clone ID: LIB3825-031-Q6-N6-B6.pep
HVNRMALDLIDRMLTFDPTRRITVEEALAHPYLERLHDIADEPVCPEPFNFDFEQQPLGEEQMKDMIYREALALNPDYAR

SEQ ID NO: 109657 - protein, 91 aa, Gossypium hirsutum
  Clone ID: LIB3825-031-Q6-N6-B7.pep
RIGTTVLSYVNMVCATLRHSIPKSIVYCQVREAKRSLLDLFYTELGKLEQKRLSALLNEDPAVMERRSALAKRLELYRSAQAEIDTVAWSK

SEQ ID NO: 109658 - protein, 81 aa, Gossypium hirsutum
  Clone ID: LIB3825-031-Q6-N6-C5.pep
HHRYIFETKEIKQSESKGKKAKDTKGESISKEKVIARLQECGPRFTLKLVSLQHGTFDTKGGEFEWVHKPEMDTSRRRFFL

SEQ ID NO: 109659 - protein, 70 aa, Gossypium hirsutum
  Clone ID: LIB3825-031-Q6-N6-C6.pep
VQTLRLGPIILREIIHTNLRTTTKKTKKKGPNQTILTGPTQSLRHNPIPGAILRLPRKKHDITGPKKPGN

SEQ ID NO: 109660 - protein, 98 aa, Gossypium hirsutum
  Clone ID: LIB3825-031-Q6-N6-C9.pep
GVGQGLLVSLPVLVVSRGLGMLLSALPSGMRGLLSVGFGFLPPPHAYSIFLAFVVSLLCSLILPGGRPPINVLGPDFIIALSPAVFPPPPRWCRLPGL

SEQ ID NO: 109661 - protein, 48 aa, Gossypium hirsutum
  Clone ID: LIB3825-031-Q6-N6-F2.pep
QAPGLTPGNDPPIPARVLHAYQLSLFRAGLKHGDSMVLGEICVQIAIP

SEQ ID NO: 109662 - protein, 104 aa, Gossypium hirsutum
  Clone ID: LIB3825-031-Q6-N6-G7.pep
QGQTAPKGRENKAPIIKNREKNQNWPQNPKKKKPSSYFKKKGQKPETYSRLKGTKGNSGKKIKKGGPAKKKPPKKKKVAPCFGPYGGGPPVLANKKDQGPPPGN

SEQ ID NO: 109663 - protein, 141 aa, Gossypium hirsutum
  Clone ID: LIB3825-031-Q6-N6-H3.pep
GAVFNFTCIEMRDHEQPQDALCAPENLVRQVGLATKEAQVPLAGENALPRYDESAHEQILKASSLNIDGSSNDREMCAFTYLRMNPSLFQPDNWRRFVAFVKKMNEGKDSRRCLEQVEREAEHFVNVTEPFVQEAALALMP

SEQ ID NO: 109664 - protein, 144 aa, Gossypium hirsutum
  Clone ID: LIB3825-031-Q6-N6-H7.pep
HEDAAIYEQQKEQEYLEWKTARREELSEYRKQIGEEYVGNVEKELERWQNARKARKANNDMNLQETMDKELDSHRLEHGPKKRKIPGGNNNEDEEDVEDINVGEDDMMDDVLGVDDNNGRRGDETAKAEPDNTSPVPDNNVDQL

SEQ ID NO: 109665 - protein, 82 aa, Gossypium hirsutum
  Clone ID: LIB3825-032-Q6-N6-A11.pep
SYLGRDDHKTLPVQVSKKFTAIYCSNLIRISSCLKIFVVGNVISRANQFLLCLLSEPLHFAFQFVPRFNFHLTTNIYICSCE

SEQ ID NO: 109666 - protein, 157 aa, Gossypium hirsutum
  Clone ID: LIB3825-032-Q6-N6-A3.pep
KLTMAAMEQMPLMKSVVYEALRIEPPVPLQYGRAKKDIVIESHDAVFQVKQGEMLFGFQPFATKDPKIFERAEEFVGERFMGEEGEKLLKHVLWSNGPETQQPTLGNKQCAGKDFVVLMSRLLVVELFRRYDSFDIEVGKSALGAAVTVTSLKRASF

SEQ ID NO: 109667 - protein, 46 aa, Gossypium hirsutum
  Clone ID: LIB3825-032-Q6-N6-B11.pep
NVQLMDDELNERRKTWTPPPYKANRGTLHKYIKNVQSASMGCVTDE

SEQ ID NO: 109668 - protein, 64 aa, Gossypium hirsutum
  Clone ID: LIB3825-032-Q6-N6-C1.pep
PILNEGKVNVAATPGCGPYLKPLGLSRDALLQLMCCRYALLDFEQFVSPFQNKNKNQIISPFVQ

SEQ ID NO: 109669 - protein, 69 aa, Gossypium hirsutum
  Clone ID: LIB3825-032-Q6-N6-C4.pep
CFVKKGGFLRPFSWATPKKRGVFKTSRSGRGFFNPLRIFRRTLKKLKFFGVFIFMFLGKLFFAKPSQGL

SEQ ID NO: 109670 - protein, 119 aa, Gossypium hirsutum
  unsure (1)..(119): unsure at all Xaa locations
  Clone ID: LIB3825-032-Q6-N6-C6.pep
KVGAFNDSFFRVAXVSRRQTMVRISGGLRVKVYRGESSPXAAMVKAPDVSXRCSELGRAALHIKIGATAGNISGTAGTCAQSALSSLARSRVLSVSIKNVSSTPTDCPRNKGVHLGSRL

SEQ ID NO: 109671 - protein, 143 aa, Gossypium hirsutum
  Clone ID: LIB3825-032-Q6-N6-D10.pep
LELSARVPLSQICKMHSFRRKHMAYSSVYDQTRYKVPPVECVLYPRVAEILKRFDPVVFAGRRRPVNRHHLVRAARSLGDTVLNNKSPVVELCSLHVGAFFFLSVCFKEQLGVSFVYRHSREQDSTQSGLRKEVIGLFFASDS

SEQ ID NO: 109672 - protein, 123 aa, Gossypium hirsutum
  Clone ID: LIB3825-032-Q6-N6-E5.pep
NYIQHMKSTKYCICPKGYEVNSPRVVESIFYECVPVIISDNFVPPFFEVLDWGAFSIILAEKDIPNLKDILTSIPQERYLALQLGVRKVQRHFLWHAKPERYDLFHMTLHSIWYNRVYQIKLR

SEQ ID NO: 109673 - protein, 59 aa, Gossypium hirsutum
  Clone ID: LIB3825-032-Q6-N6-F1.pep
RELRNARVDPPINDRTLPACQLSLYIVRLIIAGSMDIDSCCVREIAIHKHTHNTNQPHT

SEQ ID NO: 109674 - protein, 89 aa, Gossypium hirsutum
  Clone ID: LIB3825-032-Q6-N6-F7.pep
LSSQRMVQQPSTASGLPSTGSATIMQTVTPAAVNTQTMGASLGPSCASGLPCNNSSTTTRPPCISCGSRVTGKLSNGQRNSRSNPSFTC

SEQ ID NO: 109675 - protein, 117 aa, Gossypium hirsutum
  Clone ID: LIB3825-032-Q6-N6-F9.pep
RNPGLLGHIKKSLRVNQAKPVFFFLRKKGSFVFREFLLVLAKIPVFSVCFPQMWETLPSPQWGYLVALFPPWKPPLKIFFFIILFTGTRRFSASLTGLPGILWPFFPKKFWSLFGRF

SEQ ID NO: 109676 - protein, 98 aa, Gossypium hirsutum
  Clone ID: LIB3825-032-Q6-N6-G8.pep
CSTHPVIQRLWEDVQGFSKEDKARSLQFLRGTHKVPLEGFSALQVMAGSREFQRHGAYGSSGHLHSGHSCFARLARTEYPSRGTYSMELATRIFSQRR

SEQ ID NO: 109677 - protein, 91 aa, Gossypium hirsutum
  Clone ID: LIB3825-032-Q6-N6-H11.pep
GICTPCGISSKSTPMMRRGPFGPRSLCNACGLFWANKGTLRDIPKKTQDLSLVPVQQVCSLAPKLVRFLDLNYYPLHFVKHKRGFALPFIS

SEQ ID NO: 109678 - protein, 86 aa, Gossypium hirsutum
  Clone ID: LIB3825-032-Q6-N6-H9.pep
LYDGSDMGPFRDLPASTIVMLKEKIVAEWPKDKKIAPKGANFIKLINAGKILESGKIVGQCRVHFGDLPETVISMHVVVQPSVTKV

SEQ ID NO: 109679 - protein, 80 aa, Gossypium hirsutum
  unsure (1)..(80): unsure at all Xaa locations
  Clone ID: LIB3825-033-Q6-N6-A4.pep
PDPVPLFALAPQSLFLARPSLMPYPSPRDXLLETPGEVFSYVASGLLRVGVNPQAPLSEALRGPSAPGISRPPGSIVLVP

SEQ ID NO: 109680 - protein, 162 aa, Gossypium hirsutum
  Clone ID: LIB3825-033-Q6-N6-B3.pep
PPKENYPPPKIMGGEQEPKQGGKTAVFLPYPRKGNKTPLHKRQGAKGGNFFHSKSLPLKKKKKPRETGGERKDKKEPPRFGAATLSQTRRERAIWPTRRKGGAHPPPQGKSYNPAPAKKGLGPEKANWEIPTQRPTPFPKSKRGISRPWQHKGGGGHFKGRK

SEQ ID NO: 109681 - protein, 63 aa, Gossypium hirsutum
  Clone ID: LIB3825-033-Q6-N6-B9.pep
CGWSLNPRCCGLTPVDLSMEVVWPSRCYSLPGFYLISSSVMVFEFYVVFVFCFLLLRILNLSS

SEQ ID NO: 109682 - protein, 74 aa, Gossypium hirsutum
  Clone ID: LIB3825-033-Q6-N6-C11.pep
YLQQNLREFTVPFFVLHGTDDTVTDPQASEKLYKEAASTDKTIRLFQGLLHDLLFELEREVVTDDIIEWLNCRV

SEQ ID NO: 109683 - protein, 59 aa, Gossypium hirsutum
  Clone ID: LIB3825-033-Q6-N6-C4.pep
SEFILFDPCITLNFNRFLCIINSAWISACLNWNRTDCNNPKLHPLEIIYPTTIDISNTS

SEQ ID NO: 109684 - protein, 87 aa, Gossypium hirsutum
  Clone ID: LIB3825-033-Q6-N6-C8.pep
VKNLCFFVAGTWVTASAHIITAVIGSGVLSLSWAIAQLGWIAGPIALGIFSIITWFTSTLLADCCRDPVSGKRCSCYMDAVKSNLGD

SEQ ID NO: 109685 - protein, 99 aa, Gossypium hirsutum
  Clone ID: LIB3825-033-Q6-N6-F2.pep
RKQFQKQRTGSKKVKGGNRRVNKPKKKTRRKQKVKKPGNLKSKLNKKKGKGPTTGCQSKKTKGAVSLKKRTRQQERGLDLRAPREVYFSPQKGETQKGK

SEQ ID NO: 109686 - protein, 62 aa, Gossypium hirsutum
  unsure (1)..(62): unsure at all Xaa locations
  Clone ID: LIB3825-033-Q6-N6-F4.pep
TVVNWFGAWAVFYTFNFLMRWGAXGPFFFYAAINAGAILFGVPLGPETKGKPLEQIQAALNA

SEQ ID NO: 109687 - protein, 112 aa, Gossypium hirsutum
  Clone ID: LIB3825-033-Q6-N6-F5.pep
NFLSYIRLKGIVYWIHLRSKKKKKKKKKKKKKKKKKKKKKKKKKKKKKKKKKKKKKKKKKKKKKKKKKKKKKKRGGAPPFFFFFKKKIFFKLHILKWGLKKKFFFFFFGPPP

SEQ ID NO: 109688 - protein, 77 aa, Gossypium hirsutum
  unsure (1)..(77): unsure at all Xaa locations
  Clone ID: LIB3825-033-Q6-N6-H1.pep
PGGFFLFRVPFVKNKGFQSFFPKGGPFLHGSVAVXNFWFKKKVKVLVWDGPPQRVGDKLWAFSGVFFWVSPWREKYV

SEQ ID NO: 109689 - protein, 152 aa, Gossypium hirsutum
  Clone ID: LIB3825-033-Q6-N6-H11.pep
TPLEKKGGFAFFQPGRPFRKQSKVWGGPPLASRPSTFFGGEVLEPTTGGFFFEPRGMGVFFPPQALVVLVSVPGHPPQGRVLACTFFQLPFLGFFKGGGGWGFFPVFLFFRRVGFYSPFSLKFRFPKFWGGVLFLPPFGPVFPPFLKCFFPL

SEQ ID NO: 109690 - protein, 47 aa, Gossypium hirsutum
  Clone ID: LIB3825-034-Q6-N6-A3.pep
RNTIFPQEPLMPLIPPTFNPPPIRKTWSPSRSRVGNSPVQPRGLLVR

SEQ ID NO: 109691 - protein, 70 aa, Gossypium hirsutum
  Clone ID: LIB3825-034-Q6-N6-A6.pep
YMSVKQLMWWLASISLSLVLSIGVDVQGSLADPGAMFPPMNFQPWNVGGVHEFPPTAADNLKTSMAFVPS

SEQ ID NO: 109692 - protein, 155 aa, Gossypium hirsutum
  unsure (1)..(155): unsure at all Xaa locations
  Clone ID: LIB3825-034-Q6-N6-B10.pep
MDQFTRNNQVMFKIFPSQCQVRDLKTNEVLLQGSVQHGLYKLRFNNTLKNDQPSQATSCFQTHASVPLSLWHARLSHPCRNVLIKALQCCNMVFYDNKDMFACVACHLGKEHKQPLPSSETQYVAPLQLVAADVXGSAPVTSNGFRYYVAFTDAF

SEQ ID NO: 109693 - protein, 138 aa, Gossypium hirsutum
  Clone ID: LIB3825-034-Q6-N6-C11.pep
GFHLHFAYPYLPLDNHHQPSPDDTISPTKKAKQGISEAESQVPETIANYTNIEPLPSSIEGCPPEMSLEAGFSQQGLLEDVVPWVIRNPSHNNNISSISSSSSSSNYSRSPPASPYSLSTSPFYDPCLDILSINSSIR

SEQ ID NO: 109694 - protein, 69 aa, Gossypium hirsutum
  Clone ID: LIB3825-034-Q6-N6-D10.pep
APLLAIQSCIKGGGLQGDRCMLREDCLWVTVIHIHNYPQDSSGKPEVPREGGHLSELTYINCPVLTGQT

SEQ ID NO: 109695 - protein, 105 aa, Gossypium hirsutum
  unsure (1)..(105): unsure at all Xaa locations
  Clone ID: LIB3825-034-Q6-N6-D12.pep
RQIHDGKATDPARQAVESLISLMKNPFTPQRFWLPLLYDSLKLLNWKERPLLNVSQTNLLLNKLQELSMARLRPDFIESELPPQALNSVRLAXLGPNLGRAILEE

SEQ ID NO: 109696 - protein, 107 aa, Gossypium hirsutum
  Clone ID: LIB3825-034-Q6-N6-D7.pep
PGVLFEGKGLLKKALKAYWNALGMDPNHALSLISAAVVLRQLGGQFDAVVKSLLMNALRVDKMNPSAWYTLGPLPKNENSPSSLCEPAQCFEAPVILEKSAPVDPFK

SEQ ID NO: 109697 - protein, 53 aa, Gossypium hirsutum
  Clone ID: LIB3825-034-Q6-N6-E10.pep
ARFYTQLGKKEGKQLSQMLDEDPALMERRQQCAKRLELYKAARDEIDSVSWTR

SEQ ID NO: 109698 - protein, 98 aa, Gossypium hirsutum
  Clone ID: LIB3825-034-Q6-N6-E11.pep
GGLTDAGVKNIKDLPSLTLLNLSQNCNLTNKSLELISGLNALVSLNVSNSNITNDGLPYLKPLKNLRSLSLESCKVTAAEIKKLQSTALPNLVSFRPE

SEQ ID NO: 109699 - protein, 87 aa, Gossypium hirsutum
  Clone ID: LIB3825-034-Q6-N6-E7.pep
ILDPFFCGAKRCGNPWGSPFLKPFWPLGPHGFLGLICLGRLFFCIGFCGLLGRGCKWVYWVGLGLWVVFFTWPLNSPGPGQIWRNNS

SEQ ID NO: 109700 - protein, 90 aa, Gossypium hirsutum
  Clone ID: LIB3825-034-Q6-N6-F1.pep
AKIVHEQLCSMVERSDQELLGPNNQYLPKIVFVFAKVLCAGKDLATEQTASRMINLIRHFQQSLPAFTLASTWSSLQPQQQLALQSILSS

SEQ ID NO: 109701 - protein, 126 aa, Gossypium hirsutum
  unsure (1)..(126): unsure at all Xaa locations
  Clone ID: LIB3825-034-Q6-N6-F9.pep
AISLALDNSPQCVEPVWNFLXYLFTKKVFNATAIGAGSLLSGXAMLYNIAIVFPKAPNSFEKINGRLFWAGAVSFKVVKAILKEMEDVLYQPAVLEAASQPNSLNPSGQGLLHASAAQGQAWHNVL

SEQ ID NO: 109702 - protein, 73 aa, Gossypium hirsutum
  Clone ID: LIB3825-034-Q6-N6-G9.pep
AKGSLAPLKYCLLVKESSMYLSGSLECSQFRSQFSVIADSLHMASGFVYQFSRALGFSSVPLISVLTVQGRGM

SEQ ID NO: 109703 - protein, 88 aa, Gossypium hirsutum
  Clone ID: LIB3825-034-Q6-N6-H1.pep
HVGGPQTSGGTGANGEKSPFRGGLKGRFRALPILNGCQTGGTLFLWDGGSQARKGALRPLGQGGPNFYSRHSRRDKRGAPPKFPKPGD

SEQ ID NO: 109704 - protein, 52 aa, Gossypium hirsutum
  Clone ID: LIB3825-034-Q6-N6-H4.pep
NVENQHLAFPEAFDFLDKLFRYDHLERLLAKEARAHPYFYPFRNGESSRTGP

SEQ ID NO: 109705 - protein, 67 aa, Gossypium hirsutum
  Clone ID: LIB3825-034-Q6-N6-H5.pep
IKLSPGFSLSKKHHWLHGWEISLVSAGQANSFWEETGTWTWVAKKKGTKLYPKGPSDYAQGGGTFSL

SEQ ID NO: 109706 - protein, 84 aa, Gossypium hirsutum
  Clone ID: LIB3825-034-Q6-N6-H8.pep
LQGPPPGPVSFFVLGFPKVRGWRLAIFTFVFLKPGIFFPLKEQSGPVVMICFSPGSPIRLYQCGVVLTSLSSEKMVLKKEANSL

SEQ ID NO: 109707 - protein, 73 aa, Gossypium hirsutum
  Clone ID: LIB3828-023-Q6-N6-B11.pep
LFYLSGINHIKKGGGPLELDSSKASARWRWSMSKISHQRGGPCTYTFEFSRDSAFLAEPENRTDHVVTLAPLL

SEQ ID NO: 109708 - protein, 45 aa, Gossypium hirsutum
  Clone ID: LIB3828-023-Q6-N6-C9.pep
FFFFFFFFFFFFFFFFFFFFFFFFFKREKKANHQFHSKKKNPSPL

SEQ ID NO: 109709 - protein, 131 aa, Gossypium hirsutum
  Clone ID: LIB3828-023-Q6-N6-D8.pep
TQAQKTWPPNQAGGETGNKSLGKNKSLKKEPQYFKGETIFQQKNLSKPGGILAPKKGQQGPNSKGGGAPHPRGRGITAIKKGTISNHWPLFFLRGKPEGSTCEKKKRRAGKPPKPPKTKKTRTPTKKAPKA

SEQ ID NO: 109710 - protein, 78 aa, Gossypium hirsutum
  Clone ID: LIB3828-023-Q6-N6-E11.pep
GEKSYPIKSGSHGQGREPIIGPAQSFLFCNTFKCTMMYIFYMALAGADEPHGEALIYLLLKWIGPTFIGLGQLFPIVF

SEQ ID NO: 109711 - protein, 59 aa, Gossypium hirsutum
  Clone ID: LIB3828-023-Q6-N6-E12.pep
PQQTMKLFIFHTHLNPKQKLEVPNDTGSTGPMQSNKNPMNFYKQKLFLTISIYMGFHQK

SEQ ID NO: 109712 - protein, 70 aa, Gossypium hirsutum
  Clone ID: LIB3828-023-Q6-N6-F1.pep
QTLHQLSRILTVRQAARCFLMIGEYYGRLRALSSLWASRPRESMMSEDHSCQTTTELQMVQPSQNHFSNF

SEQ ID NO: 109713 - protein, 73 aa, Gossypium hirsutum
  Clone ID: LIB3828-023-Q6-N6-F12.pep
RENCDPPRPWPNIPGLPPGSAERGPPFFFFFYFVFFFFFVFFFFFFFFFFFFFFFLFFFFFFFFSPSFNFKKK

SEQ ID NO: 109714 - protein, 123 aa, Gossypium hirsutum
  unsure (1)..(123): unsure at all Xaa locations
  Clone ID: LIB3828-023-Q6-N6-F2.pep
LLDSSWNFLKSILSWYHQNQARYQSPGWPALYASVLLGGVFGLISMTATVAVAVPATMVTWIPVVVLLAFFGKPKRTLVAEGKKITKEPPPPVFKTLLTEGNVVPVVCAXLGYYVLVRNDNGE

SEQ ID NO: 109715 - protein, 107 aa, Gossypium hirsutum
  Clone ID: LIB3828-023-Q6-N6-G3.pep
YKTNYPLTFEKQPFGNMGGGEALKLKKKLLGRGAPWGKGFFFSLIFPRKSSKNPKLKWGKLGRGKGLGGSFHKDFFKILKGGGENFEKKWGKGGKKMEKRGGTFNFF

SEQ ID NO: 109716 - protein, 74 aa, Gossypium hirsutum
  Clone ID: LIB3828-023-Q6-N6-G9.pep
GGYAACYTYSCSKGAFLGCSLEGSVVTTRNQENSRFYGNPSITASDILLGSLPMPPAASTLYQALSNLFAKLER

SEQ ID NO: 109717 - protein, 124 aa, Gossypium hirsutum
  Clone ID: LIB3828-023-Q6-N6-H7.pep
QAEEEASGLDFLASIKRKVFNALYQIADIPFLSNYKPQILDHIKKAEKQPNLTMGVLVSTVAIILTIFLKLIFGGKNQQCPRIETKPVPVVAETSDDQGSDGEKVEKAEKNEAAAAARRRRRET

SEQ ID NO: 109718 - protein, 53 aa, Gossypium hirsutum
  Clone ID: LIB3828-024-Q6-N6-A11.pep
ITKNKKINQKGEIKRAWKKLKENTKGKNRGKNKKKWGLNQNRSRTAKGHKKGI

SEQ ID NO: 109719 - protein, 73 aa, Gossypium hirsutum
  Clone ID: LIB3828-024-Q6-N6-B1.pep
AQVFPLGFGLDYVFHFRVPRSLFCPLNKNGSIPFVFNGPANLLISLQKTAVFSVFKLLELISGVFQYSSTVSL

SEQ ID NO: 109720 - protein, 70 aa, Gossypium hirsutum
  Clone ID: LIB3828-024-Q6-N6-C9.pep
LRLAIPMANHLQTLFLPNHSHIIRSFTQSEYFAIHATFKTHKPFYQFRPSDSVNESSTYPNSQASLLKLQ

SEQ ID NO: 109721 - protein, 147 aa, Gossypium hirsutum
  Clone ID: LIB3828-024-Q6-N6-E9.pep
ICEHDPIRYMRPMLQATFCLQPPGDTPTRRSTFDAITTGCIPVFFEEMSARSQYRWHLPEEKYPEFSVFIPKEEVVFKGLKILDVLMGIPRSEVRKMRESVIELIPRVIYRRHGSSLGLRTKKDAFDTAIDGALQTIKDKLNDLSEQ

SEQ ID NO: 109722 - protein, 58 aa, Gossypium hirsutum
  unsure (1)..(58): unsure at all Xaa locations
  Clone ID: LIB3828-024-Q6-N6-G11.pep
SNKPHRIHTPPTKINTPLQISATTMPPTIPPPNSPTIASKXSIKTEPIYNHYKKVRQT

SEQ ID NO: 109723 - protein, 91 aa, Gossypium hirsutum
  Clone ID: LIB3828-025-Q6-N6-C3.pep
GARGPTPTPFGAFPLPPPPPPFLPSLKPPGPPFFPLELRPWVAPLFPLVYSPPMLPRPPPEKPFTRHPRAPQGPPPGGPPPPPPGGPGGTR

SEQ ID NO: 109724 - protein, 94 aa, Gossypium hirsutum
  Clone ID: LIB3828-025-Q6-N6-D12.pep
FPKTDIPRSILKLQGEGLGNEMAGVMDGWVVCCYQVGVRMVWNRNKGVPFACCEWWVDASFVAMEKFPGRKWIHGRWIYPFISRKLTLFGGDVA

SEQ ID NO: 109725 - protein, 122 aa, Gossypium hirsutum
  Clone ID: LIB3828-025-Q6-N6-D2.pep
KGSELKRMGKILDTTELGGGQMQKTLDRAIQASYYIIYQMKSISWRSGSELECEPRRKCANQWRLMLILILLCLVLRFSIFLVGFSNLLRIISSRRVRFTQVFLIGFGNPYRIISFRRVHFT

SEQ ID NO: 109726 - protein, 90 aa, Gossypium hirsutum
  Clone ID: LIB3828-025-Q6-N6-D3.pep
TPKGFKFKKKIFPIKKKTKSTPMGHFKASIKKRVGLGPEKGFLLLGGESIKGENNLSRLTGLEAIGENGFMGRRNFPWFGCDQGLPILGG

SEQ ID NO: 109727 - protein, 165 aa, Gossypium hirsutum
  unsure (1)..(165): unsure at all Xaa locations
  Clone ID: LIB3828-025-Q6-N6-D8.pep
MQRTKLKKTLCSLNLRQKCLQTEHQLLKSRCMDTPPFNPLLETVQHDTHLHHMQGGDGTETLTGITSKLESLLGGSNRKMLQSSAISSSXSSFSDRQLVGSQERGAFSVTTSAKLSEENLNLHPPISSMSGGVAKTRGNENLAVVDENNMRNLFLLVFLEELNVV

SEQ ID NO: 109728 - protein, 54 aa, Gossypium hirsutum
  Clone ID: LIB3828-025-Q6-N6-E12.pep
ILALDSTLQMILSRLQKASDDNLVHICSKVVQKIDFVSLNSNLILLVKSPGELG

SEQ ID NO: 109729 - protein, 83 aa, Gossypium hirsutum
  Clone ID: LIB3828-025-Q6-N6-E2.pep
PKFTPVITKYQECIHTPQQVNGFICALHVTTTSKTICSWYETSENKHGPDLWFSALKEQVTPSVVGQISQQILGLIKDLMAKQ

SEQ ID NO: 109730 - protein, 83 aa, Gossypium hirsutum
  unsure (1)..(83): unsure at all Xaa locations
  Clone ID: LIB3828-025-Q6-N6-F1.pep
IPLVIMYNILPLNIKDLTTNLPTLPNLLTSXIITISTNFLLTLTISLTFTIYPLVTAFTVVFIPLLVPKTKWTSLXXIQSSFX

SEQ ID NO: 109731 - protein, 47 aa, Gossypium hirsutum
  Clone ID: LIB3828-025-Q6-N6-F2.pep
RRRRGPVSGTKGMDRFRSEEAFYVNPLPDCLCKRVSGNVNASTASMR

SEQ ID NO: 109732 - protein, 75 aa, Gossypium hirsutum
  Clone ID: LIB3828-025-Q6-N6-H1.pep
KDTRSPFYGLMHIDFFDSFSCEYDIGVGIGYFILELGKVTSVQVYGAFYGGVTFWCNDVINLKLYYESCGKMFIG

SEQ ID NO: 109733 - protein, 72 aa, Gossypium hirsutum
  Clone ID: LIB3828-025-Q6-N6-H7.pep
FISLSMTECLAFGALIPPLLTSTGCGLASCWFALMGFQWARFFLSLQRLLSPNGILYSEDLTRFELKDMKAS

SEQ ID NO: 109734 - protein, 85 aa, Gossypium hirsutum
  Clone ID: LIB3828-026-Q6-N6-A9.pep
SLVFPVGISFFPVPPLFFVALLSRFAPWGPLFFFHPPPPLKGGFFFKIFSLALNQDKFRVQTVIHFQKKKKKKKKKKKKKKKKKK

SEQ ID NO: 109735 - protein, 79 aa, Gossypium hirsutum
  Clone ID: LIB3828-026-Q6-N6-B2.pep
GGRFSPFCFGGGPPRGGVFWGPKKAPPPNFYTPLEKSPCLNGPKNPPPSGGCSPKLKDPAPCFWGSIKKKNVKGVFPKV

SEQ ID NO: 109736 - protein, 94 aa, Gossypium hirsutum
  Clone ID: LIB3828-026-Q6-N6-B9.pep
EAQDITDLGSIKDAAKIFVPGGATLYNARTIKIKEDEGFKTYYFYEFGRDEQHIAIMAAVSGGKAIIAGTTAPQSKWDDDGVKLRSAAISLTVL

SEQ ID NO: 109737 - protein, 65 aa, Gossypium hirsutum
  Clone ID: LIB3828-026-Q6-N6-C1.pep
NALQHQHNCFILYDQYEDSYFYLRIMFYYGITYVLLENGVICTYPMLSLSSLLIETENFLMPYLG

SEQ ID NO: 109738 - protein, 126 aa, Gossypium hirsutum
  Clone ID: LIB3828-026-Q6-N6-D9.pep
GFWVPSLRGGSPGNWGKTPLFWGKPNSNGFFSPYNNKPGTPLWGGIWGPYPLVFGGANDGPGAPKGGPLIAFFSKNFGGLKKLPAISHHFLRLLYPGVRANHFCPKYFPPPIGGEAHPKNRGPIKG

SEQ ID NO: 109739 - protein, 63 aa, Gossypium hirsutum
  Clone ID: LIB3828-026-Q6-N6-E2.pep
FYSDPLSFICRVHAIAITYKAHIFNELGIKLTSLLTKSAGCKVHPADLFIKNISCRTIFTINT

SEQ ID NO: 109740 - protein, 78 aa, Gossypium hirsutum
  Clone ID: LIB3828-026-Q6-N6-F12.pep
LAPSSSSSDLRPELISSKKDSYLSRIPSSASTSSSSVGLIFSQTGSVPLSDLQLSSQSSVPLSSSRSTRQGGEVRRTN

SEQ ID NO: 109741 - protein, 53 aa, Gossypium hirsutum
  Clone ID: LIB3828-026-Q6-N6-G1.pep
IGLALLSCWLCHHFSCSLIIVFFHLFLRTWYFVCFVIKNPILYLYDAGFFPLI

SEQ ID NO: 109742 - protein, 87 aa, Gossypium hirsutum
  Clone ID: LIB3828-026-Q6-N6-G2.pep
LNYTANLYKTIIIHSIRLSIHINDTSYRAPNIFPNKQVSMIEYSGKPQWKSWHWRSELFLDVQWFHFRPYIKPEVRHQFGGGQYMGE

SEQ ID NO: 109743 - protein, 57 aa, Gossypium hirsutum
  Clone ID: LIB3828-026-Q6-N6-G9.pep
PFSSKFTHLWYLLQFPPQMLMKMNPLPLFRDPFSPPNLVNLVSRLYIWFIYCPLWQL

SEQ ID NO: 109744 - protein, 76 aa, Gossypium hirsutum
  Clone ID: LIB3828-026-Q6-N6-H1.pep
SKKEIFASGTPNNPVRLFLKNKNGSINGFSYQLLFKKEKAPYMDVNSGQWCPGEKRLLFSPSVYGPIKIWGLETLP

SEQ ID NO: 109745 - protein, 102 aa, Gossypium hirsutum
  unsure (1)..(102): unsure at all Xaa locations
  Clone ID: LIB3828-026-Q6-N6-H12.pep
RFRTIAKQKHVLRGRSVRGVKFWDPYLFFMNPRPTXRSRYLDRLPEEMTVKPGGQSPIQESNHVQKVLGDVLGFECPGLTRKDTPMLLAGNDGKVESMPNGK

SEQ ID NO: 109746 - protein, 79 aa, Gossypium hirsutum
  Clone ID: LIB3828-026-Q6-N6-H3.pep
RATSDHAFNATIWDVLVDPSYQGQGLGKAMVEKMIRTLLQRDIGNITLFADSQVVEFYRNLGFEPDPEGIKGMFWYPRY

SEQ ID NO: 109747 - protein, 80 aa, Gossypium hirsutum
  Clone ID: LIB3828-026-Q6-N6-H7.pep
NPRINVSKSIKSSWYFTYTCPKHLTLLGRDKARTRQVRGLFYPKVLTSLPAFTFNVLENGVSIIPRVHPCVEADTEDLIL

SEQ ID NO: 109748 - protein, 113 aa, Gossypium hirsutum
  Clone ID: LIB3828-026-Q6-N6-H9.pep
VSPKQSQHLWYQLAMFFRDELLFWFWRRPLGMPLAPAAGIGSLNPADFKNKVPPNVENVIGRINGIAPQCFFEEEENAMDPPQSVQRGVTELVEAALLPRNLCMMDPTWQPWF

SEQ ID NO: 109749 - protein, 70 aa, Gossypium hirsutum
  unsure (1)..(70): unsure at all Xaa locations
  Clone ID: LIB3828-027-Q6-N6-A4.pep
TKTKIYGGGGACTLLQHNCSXSLKQGSNSHSSAHPFNHFFFPPCFPPGLSDIFFVSLHFSPHPFHLIFVI

SEQ ID NO: 109750 - protein, 115 aa, Gossypium hirsutum
  Clone ID: LIB3828-027-Q6-N6-A6.pep
VTNIGLMFISGLLVNGPYSLITTAVAADLGTQDLIKGNSRALATVTAIIDGTGSVGAALGPLLAGYVSTRGWNSVFLMLIFAIFFASIFLVCVAKTEIGRMVSEEKELGSSVTAR

SEQ ID NO: 109751 - protein, 152 aa, Gossypium hirsutum
  Clone ID: LIB3828-027-Q6-N6-B6.pep
NQLKTLYNNGARKFAVYGLSLIGCAPFAISEYGTNGSFCVDKLNNAAALFNEMLMPLIHQLNNDLPYAKFTYLTPSPNSTTFVTNGTCCTIGGGGGELCLKNSKPCSNRGRFLFWDGFHPTEAWNEKVAERAYSSESSLEANPFNIHKLAKL

SEQ ID NO: 109752 - protein, 61 aa, Gossypium hirsutum
  Clone ID: LIB3828-027-Q6-N6-C10.pep
SNRSNYHVYMKVMKSICFQDIILVHHGHPPFFTSTRFTSFFSFHFLILLETFEGPVTLSWP

SEQ ID NO: 109753 - protein, 111 aa, Gossypium hirsutum
  Clone ID: LIB3828-027-Q6-N6-C11.pep
TVLYSSQLHKSATGAKDSSCKWLKPKHIHYPDTSTHIPKKKVVHSVYSPLVQKVKATTQRDIVLLYSIFAIKICSLTALSFSFCSSSKFVPIDTNSLILSPFDMSIHVKKA

SEQ ID NO: 109754 - protein, 156 aa, Gossypium hirsutum
  Clone ID: LIB3828-027-Q6-N6-F1.pep
GKGGSPGKFSGGGPYKLLQGGALDPKGVFLHPETLNFYGELWALQIPSKIKRTFWGVSGNYFPFFFNLKKKGVLGKTKWPKWEFEKKSTPHILQQCPATNGGWDKFKLSGVPNYNNGGFWGGVTGIFGQRNQEQLPIFWGGLWDIFQTFQPVGGPL

SEQ ID NO: 109755 - protein, 81 aa, Gossypium hirsutum
  Clone ID: LIB3828-027-Q6-N6-F10.pep
FYAKGKREAQWALVQRPLHGLTPPGIPEKSSYIKLWEICEQARKRAEVARLRDLLPPKGHVESVVKLKGLDIYTLQQQFPV

SEQ ID NO: 109756 - protein, 111 aa, Gossypium hirsutum
  Clone ID: LIB3828-027-Q6-N6-G11.pep
KTKKKFPVKRFHSPKKTSEQEGGIIPPFLTSPRGEKIPGFFHLTYLGSNPSNPWVCLGGFSNQKGIPGFLKFIRRIIIFLRGPPPGGPTKFLPTRPPTRPPTRPPTRPGNP

SEQ ID NO: 109757 - protein, 165 aa, Gossypium hirsutum
  Clone ID: LIB3828-027-Q6-N6-H10.pep
FSFFSLALCCFGGAFCFSRNVRSLDVWAFLRSVLSKRFGCILVEKFGFRSECKSPRPSPLMCFDVSKKSFFMRGVFCPKDIFFFFFIPRWDSMVVAVAFLYFSMLCWVGKPQPLPFNVSRCLQKILFYAGCFSPPAYFFLFLYTPLGLYGWCCGFPLIIKNCVGS

SEQ ID NO: 109758 - protein, 129 aa, Gossypium hirsutum
  Clone ID: LIB3828-027-Q6-N6-H8.pep
SFFSLGPEPPFFGFFFLPPQKKFGPFFLPLLFYPLLAPQNRAGFPPFLGGKGAPGPFPLTFYPLPPPKGMFAPPLFPVGKFSPGGGFGAPQFFFKRLSPGFSNKGPFGPPPLWGGGPPPPLFCKGFSSP

SEQ ID NO: 109759 - protein, 78 aa, Gossypium hirsutum
  Clone ID: LIB3828-028-Q6-N6-A10.pep
RPWKGLIPLLKEPIEIEVLKKLTKCLMTICKIKPGMVALNQTFPWGPAGLLTFIHPFPTGRLPFPKGLVLFGIKALQM

SEQ ID NO: 109760 - protein, 121 aa, Gossypium hirsutum
  unsure (1)..(121): unsure at all Xaa locations
  Clone ID: LIB3828-028-Q6-N6-A8.pep
IAKLSXTDXAYNPKYAEALKKLCHNYEKNPAMSAFNDVMTPSKFDNLYYQNLEKGMGLLESDNALFQNPKTRPFVQLYAKNQTAFFNDFARAIEKLSLNGVKTGNQGEVRRKCDAFNSIHI

SEQ ID NO: 109761 - protein, 80 aa, Gossypium hirsutum
  Clone ID: LIB3828-028-Q6-N6-B12.pep
RHAIKLCLKKKKKKKKKKKKKKKKKKKKKKKKKKKKKKKKKKKKKKKKKKKKKKKKKKKKKKKKKKKKTRRVVGLLTWCF

SEQ ID NO: 109762 - protein, 100 aa, Gossypium hirsutum
  Clone ID: LIB3828-028-Q6-N6-D2.pep
KIPPAEKTPPEGKNLIKGNKNIFLKKPRDIPGGLKKNPKRNQRGQTGSRKKRGKPPFAKTGKFLKKLKPVFPPQKKFCIKKNPHVTRKKKRDPRGKGFCF

SEQ ID NO: 109763 - protein, 93 aa, Gossypium hirsutum
  unsure (1)..(93): unsure at all Xaa locations
  Clone ID: LIB3828-028-Q6-N6-D7.pep
IKWAADIRKNLCGNIFPRGGTIFFPGFLYKIPKGFWVFAPTRIKIKVFSPPKKKXSFWIGGPFLVSLSPFPKIWFSQAKAIXSGPPIVPRKSF

SEQ ID NO: 109764 - protein, 108 aa, Gossypium hirsutum
  Clone ID: LIB3828-028-Q6-N6-D8.pep
PLFQPRGKSKIPFPKFFLGRGLITKLGGPPKLEAPGGLLPQKKKGPCSRFSRPLDPGLGKMVFPKSLMIPPCFSPPQILNPNSLGGMLIPFFFGPLKKVGKNPKKFLP

SEQ ID NO: 109765 - protein, 107 aa, Gossypium hirsutum
  Clone ID: LIB3828-028-Q6-N6-E10.pep
RQSHITRFSKPSRSTEPERGNALEPCSTSKSSGNVPVIVPRGGGSHERFPRTDFLTHTLPDSYVRLFSANRAWIYCPLFSETEVEEGFWAEISHGSESTIRRSIIGD

SEQ ID NO: 109766 - protein, 136 aa, Gossypium hirsutum
  Clone ID: LIB3828-028-Q6-N6-E3.pep
GVPTGLTKNLKFSLFPSPPNGTLYFPLNSGLILLQEAPFPPPDFFFFFSNPSFFFPSLPLCNFRVPLFPPFPLKDKAVLPAPPPPPPGVPPFPPPPPPPPPPPPPPPPPPPPPPAPPPSPPPFFPPPPPQFPTFFT

SEQ ID NO: 109767 - protein, 88 aa, Gossypium hirsutum
  Clone ID: LIB3828-028-Q6-N6-F12.pep
QRLIAPIPPLTKEHMQAMCKVVAKSSEDVKQSIRRARQKALDTIKKAGSSFPKDEAKRFEKEIDELTKKFVKSADELCKAKEKEITQG

SEQ ID NO: 109768 - protein, 88 aa, Gossypium hirsutum
  Clone ID: LIB3828-028-Q6-N6-G11.pep
QARRGYFLGGGGIKRKKRRGSYHITLPHITLPAKKPTIFGRGKKTFYKATLNSPLNPFSPIGEIKNKELEPTALFYNPGYFIGTLWFL

SEQ ID NO: 109769 - protein, 50 aa, Gossypium hirsutum
  Clone ID: LIB3828-028-Q6-N6-G2.pep
FLLVGRSLVNFTHAPGFNNHACRFGFKHHPYFNPMEIKFGFPITPFRLLT

SEQ ID NO: 109770 - protein, 46 aa, Gossypium hirsutum
  Clone ID: LIB3828-028-Q6-N6-G3.pep
RRRKKPGTKLRLSVNWNDLQLYNFSRSVFTSLVSLCNYESCFSSFY

SEQ ID NO: 109771 - protein, 76 aa, Gossypium hirsutum
  Clone ID: LIB3828-028-Q6-N6-H9.pep
TWLQQAQKLMEIQPKIVSGFLGVELDKVHTIDMKRFSDNVRSLFQEVQRGLEVRIARIIGDLEGTLACDGMIRFRR

SEQ ID NO: 109772 - protein, 105 aa, Gossypium hirsutum
  Clone ID: LIB3828-029-Q6-N6-A2.pep
SVGQRQLLCLGRVILKHSKLLFMDEATASVDSQTDAVIQKIIREEFAACTIISIAHRIPTVMDCDRVLVMDAGRAKEFEPPSRLLERPTLFAALVQEYADRSAGL

SEQ ID NO: 109773 - protein, 99 aa, Gossypium hirsutum
  unsure (1)..(99): unsure at all Xaa locations
  Clone ID: LIB3828-029-Q6-N6-A6.pep
MLNRVSKLRLCCVTLFYPXVMLMTFIMMLSVGFVELNVRGSLMWCYPHTSIRLGLTMMFIKGARFSIITNFFYARMLNKTNVYLTLCSAGRFYGREKKE

SEQ ID NO: 109774 - protein, 87 aa, Gossypium hirsutum
  Clone ID: LIB3828-029-Q6-N6-A7.pep
AIRYKLHHHLRVTLTMMIFLYPRCQASFKPYHTASNSVCKTEPEQTFYYIQVANFHGASLSNPTSCCPRMVQGNRSVCVEFDPSWGR

SEQ ID NO: 109775 - protein, 41 aa, Gossypium hirsutum
  Clone ID: LIB3828-029-Q6-N6-B4.pep
AGFIFYSPFLNPPFFNKQASMFPPPFLSPAINKTPPAHFFF

SEQ ID NO: 109776 - protein, 114 aa, Gossypium hirsutum
  Clone ID: LIB3828-029-Q6-N6-C11.pep
PKPHLNFFIIQHRVLSKNKKLGGSIIFGHRGVFQTGGREKNKKTRGAPTNDPRAGKGGAATLESGPDAGAEPGEGLGIKPPAEGEGAGALAAMTTLIGGGATMMGGERTPGSTR

SEQ ID NO: 109777 - protein, 123 aa, Gossypium hirsutum
  Clone ID: LIB3828-029-Q6-N6-C12.pep
SEVETELGLLFSKGGKRSSGFGNKTEQPRSGTKFEMLVEDVREGVLVFEDENEAAKYCDLMQGGGQGCEGVAEIDASSVFDLCRTVRALVVLFRRGRTPPLPQSLELNLKARKRSLEDQEGLI

SEQ ID NO: 109778 - protein, 148 aa, Gossypium hirsutum
  unsure (1)..(148): unsure at all Xaa locations
  Clone ID: LIB3828-029-Q6-N6-C5.pep
MKYYEXCCNQNSFLHENLLEGLNCKLVAGVIAETINIADAIRAAKLTTPHDSFLTWDKTLRSFEGLGMKVGFLRARLDKLMNLLTKSRRYKEAKLEQANSNEEKLKLEAKLAEVTHTLTKLDREIRLFKQENADDLEALFREVANGPW

SEQ ID NO: 109779 - protein, 82 aa, Gossypium hirsutum
  Clone ID: LIB3828-029-Q6-N6-D1.pep
YYEIMNSPERACHLAKQAFDEAISELDTLSEESYKDSTLIMQLLRDNLTLWTSDLPEDGGEDTVKGDDTKSVAKSEAKAEKH

SEQ ID NO: 109780 - protein, 56 aa, Gossypium hirsutum
  Clone ID: LIB3828-029-Q6-N6-D3.pep
IKVKEFKYQTQILYWSTKHNNPLGGIQTKRGGELIQNSEGPGKRKKERRGDSDLGG

SEQ ID NO: 109781 - protein, 93 aa, Gossypium hirsutum
  Clone ID: LIB3828-029-Q6-N6-E2.pep
STSSDAKTNPPLCSWQTIISKVEVGLPMPYRGLSKFRLNVNAEYKESLSFIPSKFIYQLGECCCIFYCWLLTLFEDQVSIDRQQQILSRIPRD

SEQ ID NO: 109782 - protein, 92 aa, Gossypium hirsutum
  Clone ID: LIB3828-029-Q6-N6-E3.pep
NKERKVNGIIEAQLLSVSPPKQLSSSAQASQIDEVFIRPPHPDLKYLSQCCSECFRTTDCHIDLPRQPSHWSIWSFHCWKCRVHICVLVPSY

SEQ ID NO: 109783 - protein, 109 aa, Gossypium hirsutum
  Clone ID: LIB3828-029-Q6-N6-F1.pep
FGNPSLNVCTSSTSPRNPAIVDALRSSFLGTQISLQNFYYGFGNEYMGKVENMGFNGELMGPSHNEEMSNASTVASMKQGLSIAVFGSERGTWNGFNSSWHGLLKSPVM

SEQ ID NO: 109784 - protein, 98 aa, Gossypium hirsutum
  Clone ID: LIB3828-029-Q6-N6-F11.pep
KNEYEGLSFNNDRAGGPPTISGDEVLRNYWQVDMGYSKWVDLAILVSMVVIYRFMFWGIIISAEKVKPILKYYMSVSPKQSSLILENSTPISSQQEMV

SEQ ID NO: 109785 - protein, 76 aa, Gossypium hirsutum
  Clone ID: LIB3828-029-Q6-N6-F12.pep
PLNEGPFTKFSLFLGVSFGEEKVIVGKGFFWAPSPWAPPRDFGPRLFPLFPGTSPRVSGFFLTFVGLGVFCQVGFG

SEQ ID NO: 109786 - protein, 86 aa, Gossypium hirsutum
  Clone ID: LIB3828-029-Q6-N6-F9.pep
KKACLIGHALEMNYFHGKNYLELGIDIGSSTVARGVVNLVLGYLNNLVIEMAFLIQANTEDELPEYLLGTCRLNHLDAAKSIPVKV

SEQ ID NO: 109787 - protein, 80 aa, Gossypium hirsutum
  Clone ID: LIB3828-029-Q6-N6-G12.pep
ANFARAVASLSKAQAKKVARFLPNPERHWGPKLRAGRQITSKHISLLGQQKVNGCLSHQDSELDAKRQKIEKLEDAPAES

SEQ ID NO: 109788 - protein, 78 aa, Gossypium hirsutum
  unsure (1)..(78): unsure at all Xaa locations
  Clone ID: LIB3828-029-Q6-N6-G9.pep
TPPVPSPKFPFFFPWMKEPFPPPPNFFFISWDPPRSSRAPFLLGGFPCFKTPPPWVKGLTXPPLPFPPSPLIFFAPPP

SEQ ID NO: 109789 - protein, 90 aa, Gossypium hirsutum
  Clone ID: LIB3828-030-Q6-N6-A1.pep
VGGACLSFNGWAMKKRGPVLVSMFSPIGTVITVLLSFITLGETISMGSLAGMLLMFSGLYIVLWAKEKEEDCSDGEGSESEFESEKLLLS

SEQ ID NO: 109790 - protein, 146 aa, Gossypium hirsutum
  Clone ID: LIB3828-030-Q6-N6-A7.pep
TEYRVIKTSTHGFTWLELSPLTGRKHQLRVHCAEVLGTPIVGDYKYGWQAHRRLQNLAESDLRKNSNEKVAKENMLPFGLNMDSGSISEKHLRLHLHCREMILPNVSQVLRNPKSFTDDDLSKLKSLEIVAPLPSYMQKSWDILNS

SEQ ID NO: 109791 - protein, 110 aa, Gossypium hirsutum
  Clone ID: LIB3828-030-Q6-N6-B8.pep
PPLSVDNEVLMMDSRSVLREDFGHIESMAYTLGKKESVSGYSIPSLLSFYQLIVCCFNLYLIELLELNYGFLGHIMCFVFSNVCVVCYYLPVLHLRCKPSFFNFRFVFLL

SEQ ID NO: 109792 - protein, 113 aa, Gossypium hirsutum
  Clone ID: LIB3828-030-Q6-N6-C2.pep
TNRPVIARTIDEPTHISRWVSSMLSNGDIENIVDSRLKGDFEINSVWRAIEVAMACLSPASTKRPTMNHVVTELSECLVAEINRTRGVDEDESRDMMAIASLNCDSDIIPLPR

SEQ ID NO: 109793 - protein, 48 aa, Gossypium hirsutum
  Clone ID: LIB3828-030-Q6-N6-C4.pep
NPAYYARVVERVVERVGIKPPLLMMATFVWSNVQASSKSSFFPLLTTE

SEQ ID NO: 109794 - protein, 142 aa, Gossypium hirsutum
  unsure (1)..(142): unsure at all Xaa locations
  Clone ID: LIB3828-030-Q6-N6-C8.pep
NQSPSWYQGATTGQGKPRGRGGPPPKPGPGAAGAPPNPRGGPPXRGGGRAKGGAGGKWEPGPNPTQKANRKRKGKGPGSQKRGQTQKDGGAPRDPVPKGKPAGPPTERKRPTRGGRPVGEWGPGGVRAAPGGPATGGRPTPP

SEQ ID NO: 109795 - protein, 77 aa, Gossypium hirsutum
  Clone ID: LIB3828-030-Q6-N6-D1.pep
VGKPSNGEGNTVDSFEKAGKEETAAVHHKRDRVHLSNLKPKGIGGCNQVECWDIFATVRGFCKLHINGRWHFLCFTF

SEQ ID NO: 109796 - protein, 182 aa, Gossypium hirsutum
  Clone ID: LIB3828-030-Q6-N6-F2.pep
EMAFWVGPLPKVGGPSQSHFPPPLDFFGRLPPLKLKVFWPPFFFFSGPLEKTAFFFNGGPFFAFFFPFWGTLLGKNPPRVSLFGPLGGLNQFFPFWIFPWILFFLNFPPFPIFFWPLFPCPFLLGRFFKVFFFFWPGCFPPPFYKPLFFGGSPPKKKKKKKKKKKKKKKKKKKKKKKKKKKK

SEQ ID NO: 109797 - protein, 112 aa, Gossypium hirsutum
  Clone ID: LIB3828-030-Q6-N6-G7.pep
AWRLKSNEEVAAILCSAVFGSLYRISIHTWCLEKKGPVYVSLFKPLGIAVAVALTVIFLGESLFLGSVIGSTIILVGFYTVIWGQANEKNMLENEVCGLESSHQKTPLIRNS

SEQ ID NO: 109798 - protein, 60 aa, Gossypium hirsutum
  Clone ID: LIB3828-030-Q6-N6-H2.pep
GIDPFSPFFIGIDPYNNGILILSALLNLSETVFLFHKRKIFSENKNRTNFPSTMSSFSVD

SEQ ID NO: 109799 - protein, 74 aa, Gossypium hirsutum
  Clone ID: LIB3828-030-Q6-N6-H9.pep
KKTLLIKFFPPTPGGGGGKALPFPKRKGENPGHRKGGPPGPIRGKKRGGPQMGPKFWESPSVTQDFRKKFPKKL

SEQ ID NO: 109800 - protein, 168 aa, Gossypium hirsutum
  unsure (1)..(168): unsure at all Xaa locations
  Clone ID: LIB3828-031-Q6-K6-A10.pep
WATTLTSNDLEEIQTFLNSAVSSSCEGLIIKTLDXDATYEPSKRSLGGVGLXKDYMXSVGDSLDLVPIAAFLGRGKRTGFYGAFLLACSDDALVEFQSVCGVGAGFSEAELADRSAGLRSEVIPDPQSFCRCSALMQPDVWFETSLVWEVYAADLTISPVPRAALAIV

SEQ ID NO: 109801 - protein, 139 aa, Gossypium hirsutum
  Clone ID: LIB3828-031-Q6-K6-A11.pep
YDGRQNRSVVGIVARDREGSVSLSCLEIHHRITSVFAAEAVACQKALQTGIGIKWESIIIEGDSLSIIRKCKEKNLDKSWVSAYIYDIHQLRLKFKECSFEYVPRSANSLTHILAKETLKRNEGVYQAGRVPPPQSQRM

SEQ ID NO: 109802 - protein, 186 aa, Gossypium hirsutum
  Clone ID: LIB3828-031-Q6-K6-B11.pep
HARNFCDVPVRNMGSWNAMISGYCQNSNAAEALDVLNEMRSEGVLMDPVTIVSILAICAQSNDILNGMSIQVYSIKRGLEYDLFVSNALINMYAKFGKFANAQKVFDNMVVRDMVSWNSIIAAYEQNDDPNRALALFYDMQLTGISPDYLTLVSLSSIVAQLGDSRSGKSVHGFVTRRGWILKDVI

SEQ ID NO: 109803 - protein, 71 aa, Gossypium hirsutum
  Clone ID: LIB3828-031-Q6-K6-H11.pep
GWLLFFFFSPPPLFFFFFFFFFFFFFFFFFILLYYIFIILIIVYLHIIIESKFLDLGSSKDTHPWDHDNAK

SEQ ID NO: 109804 - protein, 125 aa, Gossypium hirsutum
  Clone ID: LIB3828-031-Q6-N6-A10.pep
FQSICKIGTGFSEAELEERSASLRSKVIPEPKSYYRCSEMMKPDVWFETTEVWEVKAADLTISPVHRAAIGIVDPDKGISLRFPRLVRVREDKTPEQASSSEQVAEMYNAQKHNQTNNEDDGEDD

SEQ ID NO: 109805 - protein, 179 aa, Gossypium hirsutum
  unsure (1)..(179): unsure at all Xaa locations
  Clone ID: LIB3828-031-Q6-N6-A11.pep
MTIELRNLLIIVAEHGKKELIEAAFPENVAEKILSILLSEVPHEDFQVWRAEASDGFTVRSAYKLLQGTKDNPRAFAFQDDYKDFYNKLWPLDIPSKIKITMXKISWNFLATRVNLVFKKLTNTTACPRCGLRPENMDHLFRKCPGFFHRARLPNVEYFVVHYGLFGEIEMLGFIRNGA

SEQ ID NO: 109806 - protein, 100 aa, Gossypium hirsutum
  Clone ID: LIB3828-031-Q6-N6-B11.pep
NAKMKVLGYVPDYSFVLLDVEEDEKEHILMSHSERLAIAFGIISTPPKTPIRIFKNLSVCGDCHNATKYISSITEREIIVRDSNRFHHFKDGVCSCGDYW

SEQ ID NO: 109807 - protein, 133 aa, Gossypium hirsutum
  unsure (1)..(133): unsure at all Xaa locations
  Clone ID: LIB3828-031-Q6-N6-C3.pep
LAHDDVVFILSTRNFYQLRTTFACYKKKHGNPIDKDIEKSGKGDLESLVRMVILCIDSPEKHFAEVVGTSIIGLGTDEDXSLTRAIISRAEIDMMKVKSEYLNIYKSSLDDAVTGDTSGDYRNFLVPLLGGKI

SEQ ID NO: 109808 - protein, 62 aa, Gossypium hirsutum
  Clone ID: LIB3828-031-Q6-N6-D5.pep
SLRMISESVLPWINSPGFQAFAIYQSRFLPNLPVNDIACWQEDTCISPLECFLILLLSSFMF

SEQ ID NO: 109809 - protein, 107 aa, Gossypium hirsutum
  Clone ID: LIB3828-031-Q6-N6-D8.pep
SPIVPALRDFFDDALSSPVSELNFKTLVDGLGSVLYQYPFNVPPYYALILRSLTVLEGLALYADPNFKVLAASYPYFAKRLLTDPNPYLRDALIELLFKDERFRYEQ

SEQ ID NO: 109810 - protein, 75 aa, Gossypium hirsutum
  Clone ID: LIB3828-031-Q6-N6-E1.pep
RLGGVPCLARGAMFSLGTWGLRGGCGSSFLPGFRFCARTRFDIKGAGSQRGGGPSGDVHLKFSRGTGGLFGGVFA

SEQ ID NO: 109811 - protein, 73 aa, Gossypium hirsutum
  Clone ID: LIB3828-031-Q6-N6-E4.pep
FLNYLPPKKALDKYEISLLSRYTMSLMNSIRIIMRHILQHSPPFKISSYHSKPFTLIFLPISPYIIILTCVLT

SEQ ID NO: 109812 - protein, 73 aa, Gossypium hirsutum
  Clone ID: LIB3828-031-Q6-N6-F10.pep
YVRHGTHGNGRPKKQLIGFRSVILSGGEMGEIQFEVNPCEHLSRANEYGLMVMEEGRHFLVVGDDKHPITIII

SEQ ID NO: 109813 - protein, 94 aa, Gossypium hirsutum
  unsure (1)..(94): unsure at all Xaa locations
  Clone ID: LIB3828-031-Q6-N6-F5.pep
LNSFIFGWFCYSDWELLAPWWKSQIQVPVKFAMGDHDLVYTMPGVKDYIHNGGFKRNVPXLEEALVINGVSHWINEEIPDQINQLLFDFFSKFN

SEQ ID NO: 109814 - protein, 153 aa, Gossypium hirsutum
  unsure (1)..(153): unsure at all Xaa locations
  Clone ID: LIB3828-031-Q6-N6-G12.pep
FQLERTMKTLXEDFIKSQARFEDPNPGKQLWDPDSLIRIPPHDDDDGGGYGDAEGKQYRLRSYVMYLDSETLQRYATIRSKEAISLIEKQTQALFGRPDIRILDDGSLDTSNDEVVSLTFSGLTMLVLEAVAFGSFLWDAESYVESKYHFFKS

SEQ ID NO: 109815 - protein, 158 aa, Gossypium hirsutum
  unsure (1)..(158): unsure at all Xaa locations
  Clone ID: LIB3828-031-Q6-N6-G8.pep
LQTATTFLWVVRPDMVMGNPGILPGEYYKDIEGRGLMVNWCPQDQVLSHPSVGAFLTHCGWNSTLESISGAKPVICWPFLXEQPTNCLYLCNQWGIGMEISNDVKRDEVTTLVKMMMEGDIGKEMKLKALEWKKKAEEATNVGGSSHNNLNKFINDIL

SEQ ID NO: 109816 - protein, 98 aa, Gossypium hirsutum
  Clone ID: LIB3828-031-Q6-N6-H1.pep
FFVPKRGLVLSRTFRVPFKGFKKPGFPGGFFNPSPGGVFFFGYQKFFSPVFFKSFFLKTRVFPGVSRKFWLKVFFKSECEFFPIFPRLFFFLQNPWLG

SEQ ID NO: 109817 - protein, 65 aa, Gossypium hirsutum
  Clone ID: LIB3828-031-Q6-N6-H2.pep
FLPSCNFSIIGLHLQHLSEQQTRAKSFKLQIQYLKCQKFCILSTRFKIHLSKHAIVVGMRKCLLV

SEQ ID NO: 109818 - protein, 175 aa, Gossypium hirsutum
  Clone ID: LIB3828-032-Q6-K6-A10.pep
THVQRPLLSFGPKTSMKLRTCPIIVCKELRSGYHLISEFCCEGCAVTADGAFSTAWLKNLQKPMGSLVLSQDNGSRNNYNPFLFFTQPSSIPGSVMQLVGSSYLHRATAWEIYGSAPLARANALVYATCFADASSSSDAALVHVKLIQHLAVFKGYKEAFAALKTAEEKFLCVSK

SEQ ID NO: 109819 - protein, 81 aa, Gossypium hirsutum
  unsure (1)..(81): unsure at all Xaa locations
  Clone ID: LIB3828-032-Q6-K6-B12.pep
RSPPVAPAPPRAXRPAPXLXRWLLPCHRNSKVFPPLTPRRPANTTKKDNKNKSRATKIKCFFYPPSPCCKAHAXADAGXTR

SEQ ID NO: 109820 - protein, 91 aa, Gossypium hirsutum
  unsure (1)..(91): unsure at all Xaa locations
  Clone ID: LIB3828-032-Q6-K6-F11.pep
CMLFMDNDDLMIIITTATIVFLLFSFLLLFPPSRHHYHHRYHGRFHDHYHGPDRDGAHDCYHDGGHDHDCYRDHGFIATPSPPTIVNPWXR

SEQ ID NO: 109821 - protein, 41 aa, Gossypium hirsutum
  unsure (1)..(41): unsure at all Xaa locations
  Clone ID: LIB3828-032-Q6-K6-H12.pep
NSWXRSCPSQSVQINLKGSSHEASAGRTRCHTNAWEVRTRL

SEQ ID NO: 109822 - protein, 106 aa, Gossypium hirsutum
  Clone ID: LIB3828-032-Q6-N6-A8.pep
QASSIKPFGNYTRSSKANNLMARNMLLSSKHHKPTANDMLKLPLIETGIINSQCYSLCLTYRYNNLTIDKAVFDLIAWKFHCCEPVTMHQANQESLGCCSNCCCCG

SEQ ID NO: 109823 - protein, 85 aa, Gossypium hirsutum
  Clone ID: LIB3828-032-Q6-N6-B2.pep
QLKRNDFLFSCYQTLLKYRQSFYSFSSLLLPKLISARKNKAALDQPPFSLVCIVFPIYIYQILYCNYIRRPTASFFFQGFYSDKF

SEQ ID NO: 109824 - protein, 74 aa, Gossypium hirsutum
  unsure (1)..(74): unsure at all Xaa locations
  Clone ID: LIB3828-032-Q6-N6-B3.pep
KGKKHPNLGGDLHSQGEGPNPRGGGGPEPGGPPPGNXQGPGPGAPPGKPGPVPAGGPHGPKGSPKKTGGNQGQS

SEQ ID NO: 109825 - protein, 111 aa, Gossypium hirsutum
  Clone ID: LIB3828-032-Q6-N6-B8.pep
VLQHHDANDLAHHTWSHWWDRSGLHGSQPQASFLEPPDFNRYPADCQYNNLSERSIQGQDQYLDWRDSRRLSHMSYMDDLEAGGDINLHFDGIYTTSPESPTVNLRPPGFH

SEQ ID NO: 109826 - protein, 62 aa, Gossypium hirsutum
  Clone ID: LIB3828-032-Q6-N6-C12.pep
QIRPVTIYRLVTKGTVDENVYEIAKRKLTLDAAVLESGIAIENEGDASEKTMGQILTSLLMN

SEQ ID NO: 109827 - protein, 99 aa, Gossypium hirsutum
  Clone ID: LIB3828-032-Q6-N6-C3.pep
PNTISPIPKIIQTPSPIKPIRPTNQTLATHTLNLQRRTYPLTALQHRPTGHVLHRPLCSIGHALYTAAGAGTGEPRWQSGDRPLAGFLPSPSPSLLSFP

SEQ ID NO: 109828 - protein, 92 aa, Gossypium hirsutum
  Clone ID: LIB3828-032-Q6-N6-C5.pep
SKFVLTIFVVSSFENFNFSNKLLRSSSILETKGKPQDKERSICLLRKTKPPDKIQKRHDKKPSKLFLPRGQRFKTKADNKITRHKHRNRAKP

SEQ ID NO: 109829 - protein, 114 aa, Gossypium hirsutum
  Clone ID: LIB3828-032-Q6-N6-D6.pep
FPLQNFDKPKEPLWSVWALMPPLSPKPGPPFIFPQPILEDTPPKEGKGSRFVKFKAEKNELLKRSAQFGKVEGLFNPIFPSKLCPLLYFLGYIYKIEKVLPPEYVDPSFKPPLV

SEQ ID NO: 109830 - protein, 95 aa, Gossypium hirsutum
  Clone ID: LIB3828-032-Q6-N6-D9.pep
LISNSNKQKFQSTDFSLKTKKKKHMLKKKKKKKKKKKKKKKKKKKKKKKKKKKKKKKKKPLQKTPGWDPPSGLTGGMPGGPPFAYKKGVLKRRGE

SEQ ID NO: 109831 - protein, 57 aa, Gossypium hirsutum
  Clone ID: LIB3828-032-Q6-N6-E12.pep
TKMKEKELKERRITKTSMYSVKSICNLPIHLFLLLSSMGRCVIPSSFIILFFISSKR

SEQ ID NO: 109832 - protein, 143 aa, Gossypium hirsutum
  Clone ID: LIB3828-032-Q6-N6-E2.pep
TRDTPTHETRGATHGPWNRGKEPGQKKRKGERKGLGLLADKTTTGGTPESAEKTTKKPNSQRERGTAGGPRGKTTRRNPTGPTATIKRQKAVAASSKKKGATPSVRERAKPAQRGHHLQHAKRGTRPHPLHYARPLEQKRDSP

SEQ ID NO: 109833 - protein, 87 aa, Gossypium hirsutum
  Clone ID: LIB3828-032-Q6-N6-E9.pep
LSIHKCSDRPTLIDQCYQYLPFPLTVIRLKEPLRVIVESTASKTTTAAAAAAAATAAAAIIQVLPTPSISTNRSLARSTIVGGCSTN

SEQ ID NO: 109834 - protein, 75 aa, Gossypium hirsutum
  Clone ID: LIB3828-032-Q6-N6-F11.pep
PIAMGPVIVFVKPPVIAMVVVLPGRRKRRRKEKRKNPMEPVVIMTIRSPLPINNMHYHLPHNPPPPLLFASGERE

SEQ ID NO: 109835 - protein, 129 aa, Gossypium hirsutum
  Clone ID: LIB3828-032-Q6-N6-F3.pep
LRLLCGKWLPLRIPRLRPAESERSRFPRNRRPVYRAYGGFEDSEAKGTCFVPEPVRPVRFSLWPEVLPLFLFFVFFSWLHGFSCFSWPCVFVSFCSFFVSAARVGVPPPALAACIWGLVLPFPLVDSLL

SEQ ID NO: 109836 - protein, 132 aa, Gossypium hirsutum
  Clone ID: LIB3828-032-Q6-N6-F9.pep
GAPPPQCAVCPFVSNVGLGHLRVPLPVNSPFGETSPGFLVSPFFFPNPIFFFLNPLFFFKSGEFFANFLVGLPPGQKLITPGGALVFFFRNFFFFSSLNWPTPLPFFLRGNFFCPPFWGPIFGDGKFPFFFF

SEQ ID NO: 109837 - protein, 109 aa, Gossypium hirsutum
  Clone ID: LIB3828-032-Q6-N6-G2.pep
ITAPNQPHKGTRNRNPKGTTKNRKTKPREGEGIQQNKTKKNQKKKEKASTERKGKKRRTSNHGPKHQGTTPRKRPKKKQKKNPGGKKKKKKRTQGATKKRQTGTGRRTS

SEQ ID NO: 109838 - protein, 79 aa, Gossypium hirsutum
  Clone ID: LIB3828-032-Q6-N6-H1.pep
SAKAPIGSAGRFARCGVPNDSVRTHIFNQFWYQAPFVGRLIQIVSPVCPLSMQSVYENVTHLEDMFGVVFCSITPCQKF

SEQ ID NO: 109839 - protein, 71 aa, Gossypium hirsutum
  Clone ID: LIB3828-032-Q6-N6-H12.pep
ALRNEKKRPVEQRFFFWGGKKKKKRGGAPLLFFFFFFFFFFFFFFFFFFFFFFFFFFFFFFFFSIKHSISK

SEQ ID NO: 109840 - protein, 57 aa, Gossypium hirsutum
  unsure (1)..(57): unsure at all Xaa locations
  Clone ID: LIB3828-033-Q6-K6-A10.pep
LQYMXXWGGGRGXDTRSELDKIISLLPLFVRFSVENIFDLFPTELYGEEGPTGPKKG

SEQ ID NO: 109841 - protein, 186 aa, Gossypium hirsutum
  Clone ID: LIB3828-033-Q6-K6-B10.pep
GRGGGGLLSLTLSTSSSASPSHAPYSSPSANIHHKVQAPFFEGYPYPENKGSVGYDSYIVPWAQPQPQFRRQFQAESLTQTQSNSLFLGQQQPQSLLQPQYSSGYPLPQWAATPGYFTGRNHLSSANNMHSTQKPNAASTNPMEGNGPLQHSNSWATPMLAQKPYIPPYRLFEDLNVLGDGDGRLK

SEQ ID NO: 109842 - protein, 192 aa, Gossypium hirsutum
  unsure (1)..(192): unsure at all Xaa locations
  Clone ID: LIB3828-033-Q6-K6-C12.pep
RLXEVAIYGGGGGTLQMSKPPQFRYKSGQYMFVQCPAVSPFEWHPFSITSAPGDDYLSVRVRQLGDWTQALKRLFSEVCEPPVAGKSGLLRADEATKKSLPKLLIDGPYGAPAQDYSKYDVLLLVGLGIGATPFISILKDLLNNIVKMEEQADSVSDTSKASDVSVASSNESTTPNRVPSKRKKTLKTTNAY

SEQ ID NO: 109843 - protein, 72 aa, Gossypium hirsutum
  unsure (1)..(72): unsure at all Xaa locations
  Clone ID: LIB3828-033-Q6-K6-D11.pep
XLXANQPLVYGGGPFLKFPCFGIIYXENRCSNNCSKVSCVINISKRSLFGACIAYTPNLGMPYFLWLSPIHF

SEQ ID NO: 109844 - protein, 53 aa, Gossypium hirsutum
  Clone ID: LIB3828-033-Q6-K6-H11.pep
PHLNLKITLNLIYFFFILYFFFFFFFFFFKKNFFFFFFPLFFFFFFFFFFFFF

SEQ ID NO: 109845 - protein, 71 aa, Gossypium hirsutum
  Clone ID: LIB3828-033-Q6-N6-A1.pep
TQRLLATREAMKINKIIGSILADHQGDGVGNSITSTKASNSSKFASLAIGGGEFICCGSESNFGSSDHLEW

SEQ ID NO: 109846 - protein, 75 aa, Gossypium hirsutum
  Clone ID: LIB3828-033-Q6-N6-A10.pep
PFSSFGALHPGRVFKVHNPSPFLNPHGDFVENKRCAPPPALKKTPLFFFLNPHSQIQSSPVVPPPGAKTKFFLGG

SEQ ID NO: 109847 - protein, 63 aa, Gossypium hirsutum
  Clone ID: LIB3828-033-Q6-N6-A2.pep
NLNTALYLYSKVLVCHLNKLVYAPFLSQLLRVETEQAISQYKSLIGILYTCIFSNYSVVIYSS

SEQ ID NO: 109848 - protein, 95 aa, Gossypium hirsutum
  Clone ID: LIB3828-033-Q6-N6-A3.pep
KKHVDAAADKEKTPDGELKAWDVVFVKVDQNTLFDLILGGNYLNIKSLLGLTCQTVGDLIKGKTPGEICKPFNIKKVFPPEEKKGVRRENQWAFG

SEQ ID NO: 109849 - protein, 138 aa, Gossypium hirsutum
  Clone ID: LIB3828-033-Q6-N6-B3.pep
KKAPRAIKGIRRFAEKPLGPKDVRVYVQLTKPLWTRGVPSVPRRIRVRLPPQRNVVEDPQGGLSSLVPVAEIPPEGLKGLGPRALVAAGEKFLAGPGFPKPGLLFPPRFPPGFARFSHWALKKPWVGVFRFPRPGPLF

SEQ ID NO: 109850 - protein, 70 aa, Gossypium hirsutum
  Clone ID: LIB3828-033-Q6-N6-B7.pep
GEDPARCPFEQVTSTLLNFVRLFNKAHEENCKQLENEMKKLSESEKLKMNASQKNESEELLRSSIRTSNV

SEQ ID NO: 109851 - protein, 48 aa, Gossypium hirsutum
  Clone ID: LIB3828-033-Q6-N6-C11.pep
KESCPSVLTELLEHVARVNEHSVIVCRHGNEAILDGSDANGRRVKQRL

SEQ ID NO: 109852 - protein, 65 aa, Gossypium hirsutum
  Clone ID: LIB3828-033-Q6-N6-C6.pep
KLIISQFRTRIIFPLISPENILIRDSKHITVSVELFFFGSGLFAKVRTGESEFIVTLSGQIHYFS

SEQ ID NO: 109853 - protein, 68 aa, Gossypium hirsutum
  Clone ID: LIB3828-033-Q6-N6-C7.pep
VPYAANRGINFYFQLCQNKVFSGWMTQMSEAPGNKKAGFNIFHFLLVFMYEFLAHWRHHRLSDDGLIA

SEQ ID NO: 109854 - protein, 87 aa, Gossypium hirsutum
  Clone ID: LIB3828-033-Q6-N6-D11.pep
FLRDKNNKLTLRGFQVEAIFWFGRLDRLPLPLPSRPVEPPLGRLLYSPLFPYSFLPKLRFPPKLRPLKLSFRNVPLRPGKLPLPLTT

SEQ ID NO: 109855 - protein, 51 aa, Gossypium hirsutum
  Clone ID: LIB3828-033-Q6-N6-D3.pep
GSGSANVAGGAGGEGGFSGKGGGSGSGNLHFGGSGKFHFGLGRGEGFGGGN

SEQ ID NO: 109856 - protein, 97 aa, Gossypium hirsutum
  Clone ID: LIB3828-033-Q6-N6-G11.pep
EPMCCPACDLSFQFIYLTVVSKTHDRGGYRKLPRAEDNVIALKSEDITRNITTIADWIGFGPNDICPPYMLPSMRLVGFICMFSIVLSRASFISFYF

SEQ ID NO: 109857 - protein, 82 aa, Gossypium hirsutum
  Clone ID: LIB3828-033-Q6-N6-G6.pep
LCPSDPLSWRNVLITCFCKVGLINVLLLNEAFFFNKARYLLEQVKERNVCSYFSSRVASSSLALVATLANIEGIHVGFNLLC

SEQ ID NO: 109858 - protein, 143 aa, Gossypium hirsutum
  unsure (1)..(143): unsure at all Xaa locations
  Clone ID: LIB3828-033-Q6-N6-G8.pep
KDSPNPFVRQRPLAIKSAAGASNNLPQWANGNKSSSQLFPRKHMDGQSQPLLQQQQQQMVPQQDSYMKSRAEALQNVESTIHELGTIFXTRIDENMDDTLANVEGAQGQLLKYLNSISSNRWLMMKIFFVLIFFLMVFLFFVA

SEQ ID NO: 109859 - protein, 63 aa, Gossypium hirsutum
  Clone ID: LIB3828-033-Q6-N6-G9.pep
PRIYMLCMCPVVVALISLFLGIGGTNGLRKLKDAFHAVFCDPPISSCGRPFLVFPAPHTINKL

SEQ ID NO: 109860 - protein, 77 aa, Gossypium hirsutum
  Clone ID: LIB3828-033-Q6-N6-H4.pep
PVKKGKPLFGKKVLPPVFVRQRNPWGKKGGVSLSFKKKAGVLAPPKGEMKGFASPGPLGKGCVALCPKIPRPPHAFV

SEQ ID NO: 109861 - protein, 96 aa, Gossypium hirsutum
  Clone ID: LIB3828-033-Q6-N6-H7.pep
SATCLDPDQFTNFLIPNWFENESTGSTKDNPFPLPDAYMTSQQRNQKNLSEIKQMLREAPLEENRKRELSSALHVYFKDWLYASGNIRQLYCLQGD

SEQ ID NO: 109862 - protein, 104 aa, Gossypium hirsutum
  Clone ID: LIB3828-034-Q6-K6-A12.pep
DTKDSLEAGGGGEDQLSLCIYHISFQYVPRTLLFCRRTSVGLHSNQSHWMAKQIRSRGARRVSIQCHITCTPIIIRNSSSTHIKGRIVSLDMTHKTLKIHDHQS

SEQ ID NO: 109863 - protein, 67 aa, Gossypium hirsutum
  Clone ID: LIB3828-034-Q6-K6-B10.pep
QSAANYARDWISFYVVTTLRFLKYLCSTPVWDVHIGTSVWRCYSSRTFLLPEKALEILNIRVVGACL

SEQ ID NO: 109864 - protein, 109 aa, Gossypium hirsutum
  Clone ID: LIB3828-034-Q6-N6-A12.pep
ETKHNSFIGLAVIIKQATDGIRLILTHRRLNLKLPLSGQYFNANYLHHSLLTIALAAKRNRTMAAFCMGQNRFWSLLTTYVTYLALSTCSCFKGPDVLPLNVILLVIQK

SEQ ID NO: 109865 - protein, 99 aa, Gossypium hirsutum
  Clone ID: LIB3828-034-Q6-N6-A8.pep
EAETSNSEAASAALPSSIMSSEIDPSLEYELSALREAIDFGFTYFLAHGDVRAKKNSFFLKKLVINYLYAFLRRNCRAGAANMSVPHMNILQVGMTNMV

SEQ ID NO: 109866 - protein, 36 aa, Gossypium hirsutum
  Clone ID: LIB3828-034-Q6-N6-B1.pep
RSLLIVTYLVRFRCLHQHLSALIHSFYVDIPTKFLP

SEQ ID NO: 109867 - protein, 68 aa, Gossypium hirsutum
  unsure (1)..(68): unsure at all Xaa locations
  Clone ID: LIB3828-034-Q6-N6-B3.pep
IWKGQVQKWFFFKFPGKEEKSLFLGDGSDNPXFGECFWVSPQQIVPLPFVFXNPVYNKVLEVFPPPPL

SEQ ID NO: 109868 - protein, 126 aa, Gossypium hirsutum
  unsure (1)..(126): unsure at all Xaa locations
  Clone ID: LIB3828-034-Q6-N6-C10.pep
KDKRQGHILLDMLVENFHFIQYVKFSILVNSKYIYTCVCMYVCMYVLSCGQWFILFFFLNILILLVYKILLFLFXKYITALGFAILYENEFHGSWHHGMRCCVSKSSDMRHYFILLEYVEKCNFFF

SEQ ID NO: 109869 - protein, 51 aa, Gossypium hirsutum
  Clone ID: LIB3828-034-Q6-N6-C6.pep
SAILGSFRLFLVGIHTYKGMAKGEKRTALHTNIDLSAIYVIQYAFAVSSLY

SEQ ID NO: 109870 - protein, 58 aa, Gossypium hirsutum
  Clone ID: LIB3828-034-Q6-N6-C8.pep
KIILIYNSDRAGLGPKNLTRGPACFLNGPRFFAQAHFSGLYFYLNPPIFQADLRAGPG

SEQ ID NO: 109871 - protein, 77 aa, Gossypium hirsutum
  unsure (1)..(77): unsure at all Xaa locations
  Clone ID: LIB3828-034-Q6-N6-D3.pep
DAVKLISVEGMQFVIDKXRVMVSRPTXNKLTSIGGFHEPKHGEVPFPEISTVILXRFDRILIGPYQYSRGEDTKCPQ

SEQ ID NO: 109872 - protein, 92 aa, Gossypium hirsutum
  Clone ID: LIB3828-034-Q6-N6-D7.pep
GSEPLAPRWVFPVPGAPPSFCQKPFNPELTLKAHPRGGSQNRVGGAAFPLGFPLFLKPGLRPLLVFEGNPFFPLAPPFFLAPFNFYRYRFFP

SEQ ID NO: 109873 - protein, 137 aa, Gossypium hirsutum
  Clone ID: LIB3828-034-Q6-N6-E3.pep
KLGPPKKPFPLFYPPAPRENFKPFGFPPPLFLIFYPRFQRELPLFFPPFLGVGPFPLFWPPPFPLGRFFPNFGPFFFWFPQVLTREKKPIFFFLVPPFPFGIWVLEKTKSFFFYFSPFFFKKPFIFPNLKIWIFEVS

SEQ ID NO: 109874 - protein, 78 aa, Gossypium hirsutum
  Clone ID: LIB3828-034-Q6-N6-E5.pep
FVCSSKLAGRTNCQLQSLCLNPKYPALTSMYAPGNLTPLMTNITLIKAVRRTRRWTKVFNWWTSGGRTSQYHLQVHAR

SEQ ID NO: 109875 - protein, 127 aa, Gossypium hirsutum
  Clone ID: LIB3828-034-Q6-N6-F3.pep
GKSSFIKKHATTKTRLNPSKSKPGKKQKRERNRPNGEIKGGQTERSQKAWKTEIELPNPPFLLGEKPKKGGPGGAQLEPYLEGGDELKRGIEGVFILGGIFATLAIARLSTPMGAPKNVLTGGGGFN

SEQ ID NO: 109876 - protein, 72 aa, Gossypium hirsutum
  Clone ID: LIB3828-034-Q6-N6-F5.pep
MSISFGLHFLILYVPFLAQVFGIVPLSHNEWLLVLAVAFPVILIDEVLKCIGRCTTGPRYSPATISIKHKAE

SEQ ID NO: 109877 - protein, 119 aa, Gossypium hirsutum
  unsure (1)..(119): unsure at all Xaa locations
  Clone ID: LIB3828-034-Q6-N6-G2.pep
KKKGFPFPKSPVFGPHLKQNLGANPRGGKAFFGLVFFPKRGALKSKWVQTLFFKRKFFFFLIKRPPKKKXKGGPPLFFFFFFFFFFFFFFFFFFFFFFFFFFFLDYKLWECRYGLSKGL

SEQ ID NO: 109878 - protein, 54 aa, Gossypium hirsutum
  Clone ID: LIB3828-034-Q6-N6-G3.pep
FVGYTYKNFEAVKGLRHSFADVKEFGPVRQASTDSFHSDSGVDYSNSDKETRML

SEQ ID NO: 109879 - protein, 67 aa, Gossypium hirsutum
  Clone ID: LIB3828-034-Q6-N6-H2.pep
RTIISLIVKKDCTTPAKLDQNANCARDQNSKPNVTDVHFVKSSLIKLLLAIQKWQITKVDVFLKFQL

SEQ ID NO: 109880 - protein, 104 aa, Gossypium hirsutum
  Clone ID: LIB3828-034-Q6-N6-H3.pep
KQIIQLGPRTSSPKQSRAEIIQLYRPWEGALRGVARPEKPGKAPGGPWGKHLWHFSVSGFTSSEHEDELLKKIPGNPNPKGKKGLKKLSAHTGFKELAKKRAPY

SEQ ID NO: 109881 - protein, 78 aa, Gossypium hirsutum
  unsure (1)..(78): unsure at all Xaa locations
  Clone ID: LIB3829-015-Q1-N6-A10.pep
VACQLSGLDHQFIIHLIYMYIACLKEKKTSKLFVRASTTLAISKFGNEHLSWTTXELWVVWHIMNQSDHKRRQKIKTX

SEQ ID NO: 109882 - protein, 76 aa, Gossypium hirsutum
  Clone ID: LIB3829-015-Q1-N6-A6.pep
KEQALLYHSERLAIAFGLISTPARQTLRIIKNLRVCGDCHNAIKIISRIVGRELIIRDNKRFHHFKDGLCSCGDYW

SEQ ID NO: 109883 - protein, 94 aa, Gossypium hirsutum
  Clone ID: LIB3829-015-Q1-N6-A9.pep
GGIRFTINGHSYFNLVLISNVGGAGDVHAVSIKGSKTGWQSMSRNWGQNWQSNSYLNGQSLSFQVTTSDGRTVTSYNVAPANWQFGQTFEGGQF

SEQ ID NO: 109884 - protein, 69 aa, Gossypium hirsutum
  Clone ID: LIB3829-015-Q1-N6-C10.pep
ENQERHLLYKRPYSEKTRIATMAIFLRLKTTLLHNAGTTTGIPAYGIGKITAPTKRFQGSLSLLRQSLR

SEQ ID NO: 109885 - protein, 109 aa, Gossypium hirsutum
  unsure (1)..(109): unsure at all Xaa locations
  Clone ID: LIB3829-015-Q1-N6-C12.pep
DNSKAGSMSSKKPMEINPXNPLMEKLKKKAHPAKNNKFVKALVFLSFXTAFLTSXGFTLDAPNPFGPRIPRMLKPGLSIYKDAGETETYVYMPPLEDADPQGTKMEEVY

SEQ ID NO: 109886 - protein, 89 aa, Gossypium hirsutum
  Clone ID: LIB3829-015-Q1-N6-C8.pep
IVDEEAAEKQRKKVAAALQAAIQVQQTQCCNFKLEPETGFNDRVNSGENKATTNAFQGVFCRDLAAVGSLLSQAGFNRPIQVKYEALSC

SEQ ID NO: 109887 - protein, 86 aa, Gossypium hirsutum
  unsure (1)..(86): unsure at all Xaa locations
  Clone ID: LIB3829-015-Q1-N6-C9.pep
RVSANERVGATASVCAXASLGCLSAEVLVLAGNASKSLRVESTTHRHLQLAXCGMKMVYTLIKGAMAXGGVIPLIPKSLITASFKE

SEQ ID NO: 109888 - protein, 76 aa, Gossypium hirsutum
  Clone ID: LIB3829-015-Q1-N6-D8.pep
STVQGPILTLPPIYGGSTRLWHLTVVLLHHIFLKHSETYLTVCNCPYIHVPALDFKPMESAHISGRLPRHIVLYHL

SEQ ID NO: 109889 - protein, 64 aa, Gossypium hirsutum
  Clone ID: LIB3829-015-Q1-N6-D9.pep
LPRCLAVASPLSVMSQCHHSLVFFPSVSQKTKCVLRLLCLIPCIIRLFLILSDAGILYLRPPPF

SEQ ID NO: 109890 - protein, 84 aa, Gossypium hirsutum
  Clone ID: LIB3829-015-Q1-N6-F9.pep
GLKAPNAPPGLFFQHAGHRDKVVDFHWNTSDPWTIVSVSDDCESTNGGGTLQIWRMIDLIYRPVDEVLAELDKFKPHILGCEQN

SEQ ID NO: 109891 - protein, 82 aa, Gossypium hirsutum
  Clone ID: LIB3829-015-Q1-N6-G10.pep
IFPFSPLFSCPPLFFFLYALHRLPFFSKNFFSPLKPPPWAPFFLFFLSLLGPRFPGILVFGRRVLLLFVWVGGGGVFQQFVF

SEQ ID NO: 109892 - protein, 116 aa, Gossypium hirsutum
  Clone ID: LIB3829-015-Q1-N6-G2.pep
TNVAWGNPSHVLKQIVVFPSLALASSRWSFEESLNPKSMWALSGGLVIAHVLGNRVESAPRLVRPVNDLKSINVLQRALSSHCKQSLPLRDQQRPILQGAMVLSSHLSFAVIFGFT

SEQ ID NO: 109893 - protein, 57 aa, Gossypium hirsutum
  Clone ID: LIB3829-015-Q1-N6-H11.pep
APGAWCTGRKSWWSETCSQWGEVNVLKPGPQAKKFAETITTLFDGWNSQSNQGGLSG

SEQ ID NO: 109894 - protein, 115 aa, Gossypium hirsutum
  Clone ID: LIB3829-015-Q1-N6-H12.pep
IVARERFSQMSNPQGKKKTLRQQLLFQKLTALEQPGGKKKETKTIPDAGGKQKNPDGDPEGNQIEIKGETKKMGAGRGIGENRGKKEPGHNAKQEATPERKGEEPGGPKERGNSN

SEQ ID NO: 109895 - protein, 141 aa, Gossypium hirsutum
  Clone ID: LIB3829-015-Q1-N6-H9.pep
KDVQKALHARLVGVRRWTVCSNILDYQLLNLEMPTISIVGSLIKSGIPVLVYSGDQDSVIPLTGSRSLVSRLAKELELETTVPYRVWFEGKQVGGWTQVYGNILSFATIRGASHEAPFSQPERSLMLFKSFLEGKPLPEVF

SEQ ID NO: 109896 - protein, 119 aa, Gossypium hirsutum
  unsure (1)..(119): unsure at all Xaa locations
  Clone ID: LIB3829-016-Q1-K6-B1.pep
KLTRNSVPRTPQPTAMRRSARLLNQNTPFKSKVNSKDSTASSTVKLSKKPIHSNHGSTNHIRSTPQLRRSQRTSTVSSEISRNCANSTPXLRKSPRLSSGSLSNKPEGSKFVETKNDGS

SEQ ID NO: 109897 - protein, 165 aa, Gossypium hirsutum
  Clone ID: LIB3829-016-Q1-K6-B4.pep
MVRSVHHHFHDLMVPKGTLQIFTSTMPLKKLKPKAKNLVWSSSTENQKEDHNKTTPSPSLLDLPELVLDCIFDRLQPAELCAMSGVCSSLRERCVSDYIWAKRMKGKWGKVIGDAAYREWQWYIALQNRSNLLNNQRNQSNLSFESVAKIWPFLSWFNIKPRAQK

SEQ ID NO: 109898 - protein, 189 aa, Gossypium hirsutum
  unsure (1)..(189): unsure at all Xaa locations
  Clone ID: LIB3829-016-Q1-K6-D9.pep
FGHQNAQADSGCRIRXNRILDPKKSQNIAILLRALNVTIDEVCEALMEGNSDTLGIELLESLLKMAPTKEEEHKLKEFNDESPFKLGPAEKFLKAVLDIPFAFERVDALLYIANFDSEIEYLKGSFETLQAACGELRNSRMFLKLLEAVLKTGNRMNVGTNRGDAHAFKLDTLLKLVDVKGTDGKTTLL

SEQ ID NO: 109899 - protein, 198 aa, Gossypium hirsutum
  unsure (1)..(198): unsure at all Xaa locations
  Clone ID: LIB3829-016-Q1-K6-E1.pep
EWGTWEELLLGGAVLRHGTRDWNLVASELRTXALSPFAFTPEACKAKYEDLQRRYSGCKAWFEELRKQQMADVRQALEESEDSIGSLESKLESLKVKKRNDSRVDYDSSPTESTLPCPKSEGFKFSSKDTCKDGLSAGSFTQEAQTNWALDCQIPAAVPTEDMDSKPVGDALTYEREKFSSIDKLADALLGGKLPCMR

SEQ ID NO: 109900 - protein, 192 aa, Gossypium hirsutum
  Clone ID: LIB3829-016-Q1-K6-E11.pep
GVLPKHGSASGTFLSLPPIASNDPIISWVWSCIATVQMGQLTDRIEAANNLASLAQDNDRNKKIAVEEGGVPPLLKLLKESSSMEAQIAAANALLVLANEPERVRSIVEEMGVPIVVQVLRDSPMKVQIPVAKLIARMAEYDPVAQEDFARENVIRPLVTLLSFETFVDDSGTLLGKQSIHSIVQINKEMEK

SEQ ID NO: 109901 - protein, 64 aa, Gossypium hirsutum
  unsure (1)..(64): unsure at all Xaa locations
  Clone ID: LIB3829-016-Q1-K6-E6.pep
YWVPITGVPRTWGLSKDAPPLFYFRFLYIYYLFFLYFFFFFFFFFFFFFFLFFFFFFFFFFFFX

SEQ ID NO: 109902 - protein, 108 aa, Gossypium hirsutum
  Clone ID: LIB3829-016-Q1-K6-F2.pep
KKGVLAGSVSGCRVGWEVRPCLSLKPPLDTAVSAVLAGRVDGEVSSFQGPKQLAGTIPFSCIILLLSGKLNAVISLPLLAFTFRYILANCLEFRSNFEINESPFLLLA

SEQ ID NO: 109903 - protein, 200 aa, Gossypium hirsutum
  unsure (1)..(200): unsure at all Xaa locations
  Clone ID: LIB3829-016-Q1-K6-G1.pep
RSAVVSYPTSTESLGRGIDLIQNGQKYPFTFDKVFNPEASQQDVFVEISQLVQSALDGYKVCIFAYGQTGSGKTYTMMGRPEAQEQKGLIPRSLEQIFQSSQSLQAQGWKYKMLASMLEIYNETIRDLLSTNRSIGSDPTRAESAVSGKQYTIKHDANGNTHVSDLTIVDVSTITEISSLLRQAAQSXSVGRTQMNEQSS

SEQ ID NO: 109904 - protein, 140 aa, Gossypium hirsutum
  unsure (1)..(140): unsure at all Xaa locations
  Clone ID: LIB3829-016-Q1-K6-G11.pep
DAKAKFFSSVIFQQSSCSGSGSGIQTQKSTKSKSGGSDNNXXNNKEDDIGSVGLNAQERSDNGSGTQSSWTKRAIEVDSSQPISARDQVMHSRSEVLGNSWVPVTITRECDSRDDELGMCGTVNGLPLFILLFSFSLIKL

SEQ ID NO: 109905 - protein, 70 aa, Gossypium hirsutum
  Clone ID: LIB3829-016-Q1-K6-G7.pep
CYPACISTPRIIYPSTIRKISLSLYHCSITMKINNAPMSYIAWPTVILVTVVDNANKFKHCPGSCPGQLP

SEQ ID NO: 109906 - protein, 149 aa, Gossypium hirsutum
  unsure (1)..(149): unsure at all Xaa locations
  Clone ID: LIB3829-016-Q1-K6-H6.pep
DVDASQPALQHFGHEXSHLPLIMIQSDDGKNXFKPNLMADDIAPWMKDFKARTAAPYVNDXPIPKENIQPLTRRALLTPLQDMALKSCKNAPVEYYAPCGGHCQKYAPILDAXLIIYEKDSDMLIAKLDATCNDILHDNFDVRGYPTVL

SEQ ID NO: 109907 - protein, 84 aa, Gossypium hirsutum
  unsure (1)..(84): unsure at all Xaa locations
  Clone ID: LIB3829-016-Q1-K6-H8.pep
FPSLCGFFLILLHAMTIADVGAGRSDAIXGPNKPYCANMVTLVPTSILKRSXLVLITTRTCYHWTYWRSYTKENDGEELMELAG

SEQ ID NO: 109908 - protein, 68 aa, Gossypium hirsutum
  Clone ID: LIB3829-016-Q1-K6-H9.pep
PGRNILVGSSSIVLRGEKKYLSKLLLFQLNDVRFLVSIRELDENLLETMGFTMTEWMHKGRSGLMKTG

SEQ ID NO: 109909 - protein, 95 aa, Gossypium hirsutum
  Clone ID: LIB3829-017-Q6-N6-A5.pep
NKSLPHNLFSFKHATVLTGEEKIYSLNHTLKTGRNDKTYNTDFRPFFFSPSHSQSHHLVLSFYIISSKIRHLQVTTINKSFGPPNKLKDIYIYFF

SEQ ID NO: 109910 - protein, 97 aa, Gossypium hirsutum
  unsure (1)..(97): unsure at all Xaa locations
  Clone ID: LIB3829-017-Q6-N6-A7.pep
LVVASQQXVXDWASKQGITFTDFADLCEKEETIKEVHSSLAQTAKKSRLEKFEIPAKIKLISSPWTPESGLVTAALKIKREAIRRAFSEDLAKLYAS

SEQ ID NO: 109911 - protein, 126 aa, Gossypium hirsutum
  unsure (1)..(126): unsure at all Xaa locations
  Clone ID: LIB3829-017-Q6-N6-B8.pep
QKLADEFGVGVVFTNQVVAQVDGSAIFPGLQIKLIGGNIRANASTTRLAFRKGRAEXRICKVISSPCLPEAXEALFRISPGGVSDVKDYPVLAHCLFPDPKSNLSGASTASICFCSIPQLCNSFML

SEQ ID NO: 109912 - protein, 102 aa, Gossypium hirsutum
  Clone ID: LIB3829-017-Q6-N6-D12.pep
REAFPDVALDDPIVEDIDPKTWSICRSMPKAMSPSLSSANELSIAEKFRLAFVERDTRLAPKRAKNARQHQRRAEREWMMTSTRAKALALASKATKSLHGRS

SEQ ID NO: 109913 - protein, 59 aa, Gossypium hirsutum
  Clone ID: LIB3829-017-Q6-N6-D2.pep
KKKEVFAHTYMYAQVLPLALPAPPMPGMGGGFSPPPPPMGGMGIPPLMPPFGMPPMGSY

SEQ ID NO: 109914 - protein, 102 aa, Gossypium hirsutum
  unsure (1)..(102): unsure at all Xaa locations
  Clone ID: LIB3829-017-Q6-N6-D5.pep
IRQHTTHYSXKGDKVLDRVLACFRTLFPGGPAKCGRAQLLQFGPFLSPKERQALSEGRAQVCLPKLLFMLGRFSSCKILSLCEFNPLFFEGYRKMSLVTRLF

SEQ ID NO: 109915 - protein, 87 aa, Gossypium hirsutum
  Clone ID: LIB3829-017-Q6-N6-D8.pep
FNPKKFPDGIPEAPNYKGAAFFPFGLGPRFCVGMPFPPPKPKIPLSFFLKRYSFPLSPAYVPSPGPIFPLHPDQGIPVILEPPQKGA

SEQ ID NO: 109916 - protein, 51 aa, Gossypium hirsutum
  Clone ID: LIB3829-017-Q6-N6-F11.pep
FFFFFFFFFFFFFFFFFFFFFFFLFLFFVFPFLLGKTGGPETQPNGGEPGG

SEQ ID NO: 109917 - protein, 41 aa, Gossypium hirsutum
  Clone ID: LIB3829-017-Q6-N6-F4.pep
GWGLGIDRLAMLLPDSQNIKEVLLFPAMKPQDEPSTKAPAT

SEQ ID NO: 109918 - protein, 119 aa, Gossypium hirsutum
  Clone ID: LIB3829-017-Q6-N6-G12.pep
CIPLLIRMLEAKSNNAREVAAQALSSLVTVSQNCREVKKDDKSVPNLVQLLDPSPQNTAKKYAVSCLASLSSSKKCKKLMISYGAIGYLKKLFEMETPGAKKLLERLERGKLRCLFNRK

SEQ ID NO: 109919 - protein, 44 aa, Gossypium hirsutum
  unsure (1)..(44): unsure at all Xaa locations
  Clone ID: LIB3829-017-Q6-N6-G4.pep
PVTHVLVRQGVLGIKVRIILFWDSKGNQGPLSPXHDLVPIHPPK

SEQ ID NO: 109920 - protein, 82 aa, Gossypium hirsutum
  Clone ID: LIB3829-017-Q6-N6-G6.pep
PEAEWYVQKFRTRGGEPRPSDEGLFRRKVKKSQLKDPETTIVLSSTLENLFVLYIQSSILSKFVLASTLSSRFDCPVPAPFL

SEQ ID NO: 109921 - protein, 88 aa, Gossypium hirsutum
  Clone ID: LIB3829-017-Q6-N6-G9.pep
SKKGGAKKGGVGLRKIRYPEPRGGGFPGKKKGGGEFTPQQKRGREGGQNTQKRGLPGKTGAQKPNFREQVFVPGQEHQGGKKPPDPGG

SEQ ID NO: 109922 - protein, 75 aa, Gossypium hirsutum
  Clone ID: LIB3829-017-Q6-N6-H11.pep
KRKGSSRGSFEPSPPSSPPESSSSDDEKRESKRSKSKSRREKKKRPHPRNKNPSPQNEKGEGPVPLSRFFGSVKS

SEQ ID NO: 109923 - protein, 80 aa, Gossypium hirsutum
  Clone ID: LIB3829-017-Q6-N6-H4.pep
LKRVFLGICPREASFLPPVCFFLSEMFIGFEPANSGFPELSHKPFISFDDDNPVVSGKCDLFSIDPMYWGPLGSFNPLPP

SEQ ID NO: 109924 - protein, 92 aa, Gossypium hirsutum
  Clone ID: LIB3829-018-Q6_N6-A3.pep
HNTTHTYMPKNLAKVLNKNKWQKGTLLEIINKYIKYTMELTLQKNFGTTNLSFLRAPCSRQGGKTNIIYKPFWGKTDHALPRSRVYADIILY

SEQ ID NO: 109925 - protein, 90 aa, Gossypium hirsutum
  Clone ID: LIB3829-018-Q6_N6-A6.pep
VNVKKEIDGEIERVIDVAGLHGKIEELKAEMAIDSSSPKVEKLQAEIKEEIRTSLDDTALKQKVENLRREFATSSEEVIDDKVIAENGRW

SEQ ID NO: 109926 - protein, 102 aa, Gossypium hirsutum
  Clone ID: LIB3829-018-Q6_N6-A8.pep
LALKYSRYTYRPSKINTLQQAERMGGPILTLGNIEPHPRPMEKEVVSPLQISQPKNRNPVYEPLLSDSPNSSRRSLGSGAPFDFFQSQSRLSSSYSRNCKDN

SEQ ID NO: 109927 - protein, 50 aa, Gossypium hirsutum
  unsure (1)..(50): unsure at all Xaa locations
  Clone ID: LIB3829-018-Q6_N6-B1.pep
NFISGESVRSYLGIIFLDLSLNWVMQLVAMYSVFGWIILVINQNNYXFPM

SEQ ID NO: 109928 - protein, 44 aa, Gossypium hirsutum
  Clone ID: LIB3829-018-Q6_N6-B7.pep
TLGSYKYKLARERCRHWPTVLFTFVHSLYSTHVRDLKLSAVKNT

SEQ ID NO: 109929 - protein, 113 aa, Gossypium hirsutum
  unsure (1)..(113): unsure at all Xaa locations
  Clone ID: LIB3829-018-Q6_N6-C12.pep
AQVPAKMVWVKSLLSELGTLVTHKGLFWCDSSATIAIANIPVMHSKFKHMELDXRFFVKKRVADGSFQIGHISGQNQIADILTKPLSVGLFERFRNKLRVISKGEESAPEGRG

SEQ ID NO: 109930 - protein, 85 aa, Gossypium hirsutum
  Clone ID: LIB3829-018-Q6_N6-C7.pep
IFGKGLRIQEMRREDLTTEKNGWGGGGYDTVTEIISTVTHLKKTDLLSLPRCPLSYLWSSSTLRWKTCLLVTSCGSYSKKVNEWR

SEQ ID NO: 109931 - protein, 61 aa, Gossypium hirsutum
  Clone ID: LIB3829-018-Q6_N6-D1.pep
PKHLFGGTFFRPKEFIFLNGFPPRGLGGKKFPFIQNANRNAIAPRGLSPKKHKETQKIYAP

SEQ ID NO: 109932 - protein, 72 aa, Gossypium hirsutum
  Clone ID: LIB3829-018-Q6_N6-D2.pep
YKPYVFMSSMYDYDMYMKEVGNVMTEEVFMAVFTPSMAASPQKYMYASLAMVTSSEILQTPKYTGSFANDLI

SEQ ID NO: 109933 - protein, 54 aa, Gossypium hirsutum
  unsure (1)..(54): unsure at all Xaa locations
  Clone ID: LIB3829-018-Q6_N6-D9.pep
GEGTDPRCPGGRREPRGRPDDPKAYDRRTARXSTSGRLGKFTMFGLFVQAVVTG

SEQ ID NO: 109934 - protein, 83 aa, Gossypium hirsutum
  Clone ID: LIB3829-018-Q6_N6-E3.pep
PFHFVLQKSPSFTHRTPLFFSQTTSPSRRQKEAKENFQVGTFKKFQVEEEEEDQCSPVSVLDPPFEDDDDRHVNDDNADDNDY

SEQ ID NO: 109935 - protein, 57 aa, Gossypium hirsutum
  Clone ID: LIB3829-018-Q6_N6-E5.pep
HYPKKPWDDSRKLNNKMTSTYKNGVRSKQATTDQNAKPQVSGKGRRRSSTEPGTRAG

SEQ ID NO: 109936 - protein, 78 aa, Gossypium hirsutum
  Clone ID: LIB3829-018-Q6_N6-F1.pep
TNYLPFICYNDLFTLLISIYKIYVGVKIVRGRERMIITSFNNHRARESGLSKLTATASVIHHLLEKVDHGGLAIKLLP

SEQ ID NO: 109937 - protein, 100 aa, Gossypium hirsutum
  Clone ID: LIB3829-018-Q6_N6-F10.pep
GESRGSEDVMETNNFFVYQLHGEIYTLISGKMNRSLESPTSVINQLFSCRGELNVSLALSSLRSYMYRLSFIIMHSSSITLKHSFLTLCSRSRLAAFVHG

SEQ ID NO: 109938 - protein, 75 aa, Gossypium hirsutum
  Clone ID: LIB3829-018-Q6_N6-F2.pep
LVVCSWACIVGYGALKFLQQSSLLSSWRGIALSAFILAMVTFLMQILILFTQSERSTPAKVAAGKPRMTGRVRQQ

SEQ ID NO: 109939 - protein, 93 aa, Gossypium hirsutum
  Clone ID: LIB3829-018-Q6_N6-G12.pep
LSDFIWSPARKFVIAVTVEGMKRRCKLMKVERKKHRNYSSNKNGEKSTCMEGPNHCQVSFSLQSLPPPQSVAPHHLSQDSISQSMTRCLIYMV

SEQ ID NO: 109940 - protein, 63 aa, Gossypium hirsutum
  Clone ID: LIB3829-018-Q6_N6-H3.pep
TKHQINMCLNKLQRIVKEGRSKIPPMVKHDDNRIAQLISALAGCFEYDRDRIYHCADIVYNKY

SEQ ID NO: 109941 - protein, 68 aa, Gossypium hirsutum
  Clone ID: LIB3829-020-Q6-N6-A1.pep
YSECGQSSVLNHVHTNYISRQQSIKISSNVWKGPKNIKNISQGLYHNAHWATSMIPKKHLFLKMKTPT

SEQ ID NO: 109942 - protein, 111 aa, Gossypium hirsutum
  unsure (1)..(111): unsure at all Xaa locations
  Clone ID: LIB3829-020-Q6-N6-B12.pep
SRCLPVXFPASGPPRGVPLPSTVFGNLGEFFPPNGGHCPLNGFPSTRPRFFFKGVVIRCISLGFGLARPCLGFSSPPKGVFFPLFWGPGVCPKGPPWVPSGVSFCPFQQVF

SEQ ID NO: 109943 - protein, 50 aa, Gossypium hirsutum
  unsure (1)..(50): unsure at all Xaa locations
  Clone ID: LIB3829-020-Q6-N6-B8.pep
KPTYPTQILYYIFXXPENXVSMHXQRWFXDXQRKRFSCSVVKLSAIRWKV

SEQ ID NO: 109944 - protein, 148 aa, Gossypium hirsutum
  Clone ID: LIB3829-020-Q6-N6-D11.pep
SLGAQTAAAAAICRVCNSIETKKLVGEAGCITLLIKMLEAKSNNARETASQALSSLLTISPNRREVKKDDKSVPYLVQLLDPSPQNTAKKYAVSCLALLSTSKKCKKLMISYGAIGYLKKLSEMEIPGAKKLLERLQRGRLRSLFSRK

SEQ ID NO: 109945 - protein, 68 aa, Gossypium hirsutum
  Clone ID: LIB3829-020-Q6-N6-D5.pep
HALRLIYISKPKDKSAVSSIKYSAALGVQLSSILQHDSNLILQQKQVRCTVPERFFYRENLVCFKRKT

SEQ ID NO: 109946 - protein, 60 aa, Gossypium hirsutum
  Clone ID: LIB3829-020-Q6-N6-E3.pep
TKGYQMTLQLAQSNVDPTLNHPDNKYSLNISGPITWSIPTLWEKKPWAPNNRNFPEFFPT

SEQ ID NO: 109947 - protein, 198 aa, Gossypium hirsutum
  unsure (1)..(198): unsure at all Xaa locations
  Clone ID: LIB3829-020-Q6-N6-E8.pep
RLLTAKSLRSLSFSPSAPSLNSSLFVWETDNNLSDIGSADRPIDTIFKFHKAISKDLEYLDVESGKLGDCDETFLRQFIGRFHLLWGLYRAHSNAEDDIVFPALESKETLHNVSHSYTLDHKQEEKLFEDINSVLSELSHLHESFTIGHMPTDTGTELSGAYNGDCXEKNNELATKLQGMCKSIRVTXLDHHIYREEL

SEQ ID NO: 109948 - protein, 45 aa, Gossypium hirsutum
  Clone ID: LIB3829-020-Q6-N6-F1.pep
NKHLFLRIFIEKKFKLQASTSCYFFPNIGYTSMQPYEMNLHYNEF

SEQ ID NO: 109949 - protein, 43 aa, Gossypium hirsutum
  Clone ID: LIB3829-020-Q6-N6-F11.pep
IIVQTIVVFFIINYDKLTIIYLNFFKVRYPKPFSLHELHIYIN

SEQ ID NO: 109950 - protein, 150 aa, Gossypium hirsutum
  Clone ID: LIB3829-020-Q6-N6-F8.pep
IKNFLLHFFVKLFSKNKKGVPKTPKKENPQEGGASRLLRAYKRGPKQPKTKARPKRDPYKKNLEKPQAKNQNFPEAPKRDPSLEKIGFNNIAPPSQTKLSTKAGKPRGKVHFSEQDGGPKKIWWGKQTRPGTGGQEIKEKSPFQSPAQMV

SEQ ID NO: 109951 - protein, 61 aa, Gossypium hirsutum
  Clone ID: LIB3829-020-Q6-N6-F9.pep
RFIQQGAPIFFNFHLIQGILMSTSIDSDGYGNCVRLKYHSTNLGSVSVLRRHQTYDLSQIS

SEQ ID NO: 109952 - protein, 45 aa, Gossypium hirsutum
  unsure (1)..(45): unsure at all Xaa locations
  Clone ID: LIB3829-020-Q6-N6-H10.pep
FGLRHNIYNSRKIKLCQIKIQVVNPKVEYSXGTKTTFNQNYLLPF

SEQ ID NO: 109953 - protein, 76 aa, Gossypium hirsutum
  Clone ID: LIB3829-020-Q6-N6-H8.pep
SFYNLAPQGQNVTFAPTQVVPGSFAGIYHPQAATAAAVHPLLQQAQTMAGAVNMGGSAAGVYRQPQHAQMNWPSNY

SEQ ID NO: 109954 - protein, 91 aa, Gossypium hirsutum
  unsure (1)..(91): unsure at all Xaa locations
  Clone ID: LIB3829-021-Q6-N6-B3.pep
EGFKMGDDRKKAADLALKANQLSPFTVGAKFRLWYXKPVGFGLEDLGFVXENKSFLERAFPRVKKAFDEAVFELDPLSGVSNKSRSLVKQF

SEQ ID NO: 109955 - protein, 44 aa, Gossypium hirsutum
  unsure (1)..(44): unsure at all Xaa locations
  Clone ID: LIB3829-021-Q6-N6-D1.pep
RYEITIQIYLIRKSITCIKKILIKFKQMIIFFFSCGILXFSLLP

SEQ ID NO: 109956 - protein, 125 aa, Gossypium hirsutum
  unsure (1)..(125): unsure at all Xaa locations
  Clone ID: LIB3829-021-Q6-N6-D6.pep
TSATAILQQQQLPYQQPQLLQQQQFIQQHQYLQQQQQQLQPQGSYQQQFPPPNLHPYVQQQXEQEKRQQEGQITASQVQTQSELSKEESMMEPRRQTTLQVQDPLSCRNDASETVLSRSPNSQQG

SEQ ID NO: 109957 - protein, 68 aa, Gossypium hirsutum
  Clone ID: LIB3829-021-Q6-N6-D7.pep
QGTIRMLTREEWEEIREVRPRTPFESKLARPHAKIRTGEPLHMEDMKNWTIDVLTDALTRAENCSKHK

SEQ ID NO: 109958 - protein, 61 aa, Gossypium hirsutum
  Clone ID: LIB3829-021-Q6-N6-E12.pep
IGARNTRFSKDQNLYTHTSSKNHRLFAVDESVPTCMSGKPTKLYSLFTWIGYCEELFLSVM

SEQ ID NO: 109959 - protein, 123 aa, Gossypium hirsutum
  Clone ID: LIB3829-021-Q6-N6-E6.pep
QCTVSKSSAEAEYRSMAAVTSELGWISGLFRELDIGVTEPVRLFCDNKAALQIAANPVYHERTKHIEIDCHFVREKIQGGLIATEYVSTAEQLVDVMTKALGLQQHSHLISKLGLESIFIPPT

SEQ ID NO: 109960 - protein, 71 aa, Gossypium hirsutum
  Clone ID: LIB3829-021-Q6-N6-G8.pep
FRNISEAKKHGCCDKYRIKTNAEATISLSHIWCSTAISSLRSIKLYILVLHNTQRRAVKVLEKTIAIPITI

SEQ ID NO: 109961 - protein, 111 aa, Gossypium hirsutum
  Clone ID: LIB3829-021-Q6-N6-H12.pep
SDVGVSHKDDGDGNMRPLILKNKAPRWHEQLQCWCLNFRGRVTVASVKNFQLIAATQPASSGPAPPDMDKVILQFGKVGKDMFTMDYRYPLSAFQAFAICLSSFDTKLACE

SEQ ID NO: 109962 - protein, 84 aa, Gossypium hirsutum
  Clone ID: LIB3829-021-Q6-N6-H6.pep
TTQRAKSLLDIPSAHRIVIRGTPIHNNLKWLWALFIFCCRKVLGDNKWFKLISEHAILRENDKNGFETKKSYWLTRLPRRCFKK

SEQ ID NO: 109963 - protein, 68 aa, Gossypium hirsutum
  Clone ID: LIB3829-021-Q6-N6-H9.pep
TWRLSSLAFLPRGHELSPGTRLSSVFFRARCCVPIKGRIRVRDLFVSGVNTNIYAELLFVSVYGSIGI

SEQ ID NO: 109964 - protein, 138 aa, Gossypium hirsutum
  Clone ID: LIB3829-022-Q6-N6-A5.pep
ESDNVLNVYDINKETKIKSIFGEKSDFQAVSASSSSPAVVVSTGGDSSTRRVAVSAWDTRLDCRQPVILTEWSPEKPMEKISAVNTDGVEKVYIRGDVKGMLTVGDMRKASSPLRNLTDSEVETWWDADAVIVSDESM

SEQ ID NO: 109965 - protein, 89 aa, Gossypium hirsutum
  Clone ID: LIB3829-022-Q6-N6-C10.pep
GVSIFSLEVQGWLFKTPWAGKGKPRQVLPIPPWFQRLYWFRPSNVFMPPPLNFCKRPLSAKNENFTRVGTLPPRFWPCLIYPQNVCLNF

SEQ ID NO: 109966 - protein, 138 aa, Gossypium hirsutum
  Clone ID: LIB3829-022-Q6-N6-D1.pep
GHDEKVQEPEKQDEREGTQGEGKTLDEVYSQLKEGNHVARTKSDTKPASGEVPTKLPRKMKKSASVKSAFQHFEEGDIVENRRPATVREGKEKATEEEDDEVDAKADDFINKFKHQLKLQKLDSIIRYKEMINRGSGR

SEQ ID NO: 109967 - protein, 77 aa, Gossypium hirsutum
  Clone ID: LIB3829-022-Q6-N6-D2.pep
GSFLFFSSHFPGVIAQVELFFPYPPSSPILFKPLNPIIVEAHIRFLSLLKPVFSPVEKGAINLVSIEELESQLDSFL

SEQ ID NO: 109968 - protein, 68 aa, Gossypium hirsutum
  Clone ID: LIB3829-022-Q6-N6-D6.pep
TGNPSLTSFFVLSISLMKAASGFSDSLNPNGFVGKWVAHVSWHVPFYTYTMNDVEFVAEGARYFFRKA

SEQ ID NO: 109969 - protein, 97 aa, Gossypium hirsutum
  Clone ID: LIB3829-022-Q6-N6-D9.pep
AWSLSPKTFSILASNMILVTFKHLHFCAGNMDLDIFSPQPFDSQKMVGVLGPYPWEGQSIVCATGSLAYLRGILKSNITAVRSGCHYPLQERQLPPN

SEQ ID NO: 109970 - protein, 109 aa, Gossypium hirsutum
  Clone ID: LIB3829-022-Q6-N6-E4.pep
EAIREYSGTVITVSHARFFIKQIVTRVVEVKAGHLQDYVGDYNYFLEKTLEAREKELEREAELDEKAPKVKTKSKMSKAEKEAQKKQKRQAFQAAKQKSKGQKNAKRWN

SEQ ID NO: 109971 - protein, 102 aa, Gossypium hirsutum
  Clone ID: LIB3829-022-Q6-N6-F10.pep
PREPLFPFFPPPFNRPPLGKIGSPPGPRPEFPGGPPGAGGPYKFSSFFPQKITLNSPLGVPPPLVLNKKPPLPLEKEKSPLKKGPGVSRFCENPRFFFLGFS

SEQ ID NO: 109972 - protein, 122 aa, Gossypium hirsutum
  unsure (1)..(122): unsure at all Xaa locations
  Clone ID: LIB3829-022-Q6-N6-F2.pep
ARNNAVGGRSSGTCTRAMFLGGSQSVKRESAGTGVFLPRTYPXTPLRPQKKSGCSTVLVPAKVVQALNLNFADSSSHVQPHLKASFAPNYDALVARRNILLNQTRRNYRAERGLNLPQEWSY

SEQ ID NO: 109973 - protein, 127 aa, Gossypium hirsutum
  Clone ID: LIB3829-022-Q6-N6-F8.pep
GDWKGWNWRSEGDVMVNGAYFVASGEGVEFKYEKAYSVEPKSAVLIDQLTMHSGVFGVGGRDNNLGKWSSGANGGGSGFDLGDDEDDDYFDDMSGSDILLSTPFLPLFIAISSFLLLCFEPITSPML

SEQ ID NO: 109974 - protein, 51 aa, Gossypium hirsutum
  Clone ID: LIB3829-023-Q6-N6-A3.pep
VRRGYLLSCKREKKKPDRFLPYLRLYFTGALTGPNSVLRVLTTNPTSPRLD

SEQ ID NO: 109975 - protein, 82 aa, Gossypium hirsutum
  Clone ID: LIB3829-023-Q6-N6-A6.pep
WLHLRIREFEPNFVKAKGSQSKVSTPPADGRWTLGFHIAKACETARLLILEETCKQRSSVESMLAPLLREDYLVNVLDSQGD

SEQ ID NO: 109976 - protein, 83 aa, Gossypium hirsutum
  Clone ID: LIB3829-023-Q6-N6-A7.pep
IQTPHDLTDIKYQFSICIWDNSLLHGPSNIEELIYSASAMGATLQLHNYPLFLRVSTGHIQAGWTCYWVHVHVIKYFTIFLKT

SEQ ID NO: 109977 - protein, 108 aa, Gossypium hirsutum
  Clone ID: LIB3829-023-Q6-N6-C1.pep
MEKASKPVKLLSVDALKRALRNGDKVTTNRHSQGIRFLNAVTGEMSTKLVNGASKKPDQQTVGSEKRKESSVKQDTSLKRNNHLDSKRRKLEQEQTLEDHWNQRWKLD

SEQ ID NO: 109978 - protein, 153 aa, Gossypium hirsutum
  Clone ID: LIB3829-023-Q6-N6-E3.pep
RKWYGEGDAAYGRGVTTLPPDMNRKKQLKKAEKRKKKLKYNKITFFFSPFSFFFFFLPSFPPSLFFSFSFSFFFPSPADSFSFSFFSFFFSSSRNGDSRKKQGVHAGNRCRLCHWHHRCRLWQAHRQASFFFLDSASFFQFQPFFFQQFFLLF

SEQ ID NO: 109979 - protein, 96 aa, Gossypium hirsutum
  Clone ID: LIB3829-023-Q6-N6-E5.pep
QRMERQETLAREHSEEHKAALQRAVTLSVPHAYLPSRYGTFDEHEDGDNSHKSTGESSVGSSGKSKTKVSWNELIERLFEKDESGLMLLKESHRDA

SEQ ID NO: 109980 - protein, 106 aa, Gossypium hirsutum
  Clone ID: LIB3829-023-Q6-N6-F11.pep
YCFTDRKNPVGLMLLSEVALGEVYELTKAKYIEKLPKGKHSTKGLGKKVPKKSDFVKWKDDIIVPCGKPVPSSVKEFELMYNEYIVYNTSQVKMQFLLKVRFHPKR

SEQ ID NO: 109981 - protein, 65 aa, Gossypium hirsutum
  Clone ID: LIB3829-023-Q6-N6-F2.pep
PRGVPVATVAVNNATNAGLLAVRMLGVGDADLLARMNQYQEDTRDYVLTKAEKLRKDGWEAYLNQ

SEQ ID NO: 109982 - protein, 130 aa, Gossypium hirsutum
  Clone ID: LIB3829-023-Q6-N6-G3.pep
DVRTLAVYNIKRESTFHLVICFRGGKKIFVKPLTGETITLEVEIANTIDNVKTKTQFKQGIPPVQQRLIFARNLLEDGRPLSDFNIQKKSSMLLVLRLRGGFRVVFLTSVFYDGVQQNVPSFMFVKLSRL

SEQ ID NO: 109983 - protein, 91 aa, Gossypium hirsutum
  Clone ID: LIB3829-023-Q6-N6-G6.pep
NTTLAVNGLTPLLIARLDHQDAIARLNLLKLIKAVYERHPRPKQLIVENDLPQKLQTLIEERRDGQRSGGQVLVKQMATSLLKALHINTVL

SEQ ID NO: 109984 - protein, 41 aa, Gossypium hirsutum
  Clone ID: LIB3829-023-Q6-N6-H3.pep
SFHCRLNLYYLNERFSSYTDITLRQHISKAKREHTTSQTYL

SEQ ID NO: 109985 - protein, 100 aa, Gossypium hirsutum
  Clone ID: LIB3829-024-Q6-N6-A5.pep
VVGVVTLVITFSLGMGPIPWVIMSEILPVNIKGLAGSIATLSNWFSAWLVTMTANLLLDWNSGGTFTIYMLVSAFTILFVSLWVPETKGRTLEEIQRSFR

SEQ ID NO: 109986 - protein, 107 aa, Gossypium hirsutum
  Clone ID: LIB3829-024-Q6-N6-B11.pep
RAEMAEAAKRAVEGELRKWREKEQKKAVAAASRILIEAQMSTESSPQHYRIQKQNPPEKIVQAKMLEKEKSSVSKKVLLPNISGIFNRRKNQIEGGSPSYLPGEKTL

SEQ ID NO: 109987 - protein, 97 aa, Gossypium hirsutum
  Clone ID: LIB3829-024-Q6-N6-B7.pep
IEMAAWVLFSFLETYTRMFWSSESLYYNPVWHFIVSTWETIVYNPILDLDRWAIPIGCTVALWMLYWRCYGRRKHKSRWLLPMYNSHKSGSNRPRSD

SEQ ID NO: 109988 - protein, 111 aa, Gossypium hirsutum
  unsure (1)..(111): unsure at all Xaa locations
  Clone ID: LIB3829-024-Q6-N6-C4.pep
PQVLEIANDSHYLHRMTLLRAISLLGPVLGSXEITCSKLLPVVVNASKDRVPNIKFNVAKVLQSLISVVDQSVVEKTIRPCLVELSEDPDVDVRYFAVQGLQSIDQVTMSS

SEQ ID NO: 109989 - protein, 101 aa, Gossypium hirsutum
  Clone ID: LIB3829-024-Q6-N6-C5.pep
PCIELAYPKLSLCRLNKLVLTVEQRVAICIYIYVFQYLYMPPLNYFIYCHFHHLMRALMNPTNKLIDFDLFFPSFALLSGQIMKQLGPHQVPVRKKLPLVV

SEQ ID NO: 109990 - protein, 118 aa, Gossypium hirsutum
  Clone ID: LIB3829-024-Q6-N6-C7.pep
TTVLHESLPVNENSHESWTLRKLESAQVIRHLWTANCQTRSSCCLFKCFFRTSSRNLSGNSRYSIQSFFTTAASSSFPTFSRFLIKIVKVNLSGEQPHAFSLSYVSIAFSIIPTCKYA

SEQ ID NO: 109991 - protein, 116 aa, Gossypium hirsutum
  Clone ID: LIB3829-024-Q6-N6-C9.pep
PGIVSGKGKYPFSPFKKIYFFGPLCFSLKTPRFFFVLRFPIFGPGVPCQFVPGCGNFLVRMAGPMPVFFPCLMYPFSPLLFLLEPLLAFHLLSFFFGPKICFFVQLSFVFKMFLIS

SEQ ID NO: 109992 - protein, 124 aa, Gossypium hirsutum
  Clone ID: LIB3829-024-Q6-N6-D2.pep
GKKANPLQRKNKPRGPREKKKKKFERAGKGPKTARKTGKPKLGGPLGGKPQQGNQNQGEKGPPLERKPLGKHPIEDQGERFPLKGPFKKKKPNGGEAGKNRSKRAPKRICPQPKGLKNQPPTHK

SEQ ID NO: 109993 - protein, 66 aa, Gossypium hirsutum
  Clone ID: LIB3829-024-Q6-N6-E10.pep
YLSDISGMTHSKKKHIHIRIYIQVIMHKKSNKLLNNKTIEQIKRLFSFVQCTELSTQLEIIFCFSS

SEQ ID NO: 109994 - protein, 84 aa, Gossypium hirsutum
  Clone ID: LIB3829-024-Q6-N6-E11.pep
EEEKQLEIWSNQIKGMQLHCDQGLQHMHWNVLYSLPQQGASANNIRSGSGDRFDRELAVRAAAASIYSTCDFMLSKENVACSLI

SEQ ID NO: 109995 - protein, 92 aa, Gossypium hirsutum
  Clone ID: LIB3829-024-Q6-N6-E2.pep
KVNAIQMKETVEENTSTTERVFQDRQYQVDAAIVRIMKTRKVLSHTLLITELFQQLKFPIKPADLKKRIESLIDREYLERDKNNPQIYNYLA

SEQ ID NO: 109996 - protein, 120 aa, Gossypium hirsutum
  Clone ID: LIB3829-024-Q6-N6-E6.pep
PNQNPTCCLAHWNQTTRWSIALTNAAGHRDDITQSEITRKTNLITILREHNLFFVTGQQPLTSDKHQSKHRKIDLHTPEYVMLPDFKAYQRFFSHLNAMLTRELPLPLPTYISSSEPQTA

SEQ ID NO: 109997 - protein, 90 aa, Gossypium hirsutum
  unsure (1)..(90): unsure at all Xaa locations
  Clone ID: LIB3829-024-Q6-N6-F10.pep
GSLLLETLSVDYGKKSKLGFTVYPSPQFSTFVVEPYNSVXSTHSLLEHTDVAVLLDNEAIYDICRRSLDIERPAYTNLDRLISQIPFVSD

SEQ ID NO: 109998 - protein, 85 aa, Gossypium hirsutum
  Clone ID: LIB3829-024-Q6-N6-F11.pep
AAFSYFDRDGSGYITLDELQKACQEFGIKDIRMDEMMREVDQDNDGRIDYNEFVAMMQKGNPEVGKRGREGKGLSIGFREALPGS

SEQ ID NO: 109999 - protein, 106 aa, Gossypium hirsutum
  Clone ID: LIB3829-024-Q6-N6-F3.pep
SSLSPSPDSIENESFDFQFSTSEFYIEEFRSRTPAIQFDTLCSCKRAENDCPVCLSEFEPKSEINRLSCGHLFHKVCLEKWLNYLKVTCPLCRTPLLPEEESCCLG

SEQ ID NO: 110000 - protein, 107 aa, Gossypium hirsutum
  Clone ID: LIB3829-024-Q6-N6-F6.pep
IRNPAIPNFPYSKRRKRGPCTSPTLFQTLCIFLLTTIALFLQDNKHSQVNHINHQLSNTVRIPSFTGQLCHDGVLYISKVKTILGVFFQKKSSHERKVTFCLQSTLE

SEQ ID NO: 110001 - protein, 139 aa, Gossypium hirsutum
  Clone ID: LIB3829-024-Q6-N6-G11.pep
AAVIKTIIIHQDEEMKLKEKCEETRKEFLRKSQAFEEWYHKYKQRRSALDENDAGEDTNAKDPVSERQLVVESLKKRLEEEAEALKKHCIQVREKSIGSLKIRLPEIFRALSDYSHACSEAYEKLRSVTQSQKTNGAPS

SEQ ID NO: 110002 - protein, 59 aa, Gossypium hirsutum
  Clone ID: LIB3829-024-Q6-N6-G2.pep
WVDVKPVHEALVMYISDILQIMLNDEYKSVELRVLSNPSKEAQVSIHVFFEPKCQESVI

SEQ ID NO: 110003 - protein, 100 aa, Gossypium hirsutum
  Clone ID: LIB3829-024-Q6-N6-G3.pep
AAVKIAEEHSDFVIGFISVNPASWSRAPVNPAFIQATPGVQMVKGGDDLGQQYNTPYSVIFDRGSDIIIVGRGIIKAANPAEAAREYRLQGWEAYKAKCS

SEQ ID NO: 110004 - protein, 59 aa, Gossypium hirsutum
  Clone ID: LIB3829-024-Q6-N6-H1.pep
KIKTKQTLKRGKPRSNSCLYLQPRKPPKIAHSTLQKLKCRKGPGASRIWKTQQTTTQKV

SEQ ID NO: 110005 - protein, 58 aa, Gossypium hirsutum
  Clone ID: LIB3829-024-Q6-N6-H3.pep
KKNFKMRLESSKTGRKGNLNVGAEIFQMAPFLQMVELRKAKGDTLEFHKFYKNLSTCF

SEQ ID NO: 110006 - protein, 55 aa, Gossypium hirsutum
  Clone ID: LIB3829-025-Q6-N6-B9.pep
FIGILLCGCFIDSTWSQFSWCFLPKVRLCIGKAILYCKRLMGSTTYCNNKSVHPV

SEQ ID NO: 110007 - protein, 130 aa, Gossypium hirsutum
  Clone ID: LIB3829-025-Q6-N6-C3.pep
IPAGSSWQLWALGTLVPLFLSFTTSKWGPFSKLKNEADNMLETAEQITDVVENVAGKVEEIADQVGEQLPDGGKLRATLELVEDLAEGTAKNAHLAGDFIDKVQEIEDKMESLMDAVDTNDDKKPKNVQD

SEQ ID NO: 110008 - protein, 90 aa, Gossypium hirsutum
  Clone ID: LIB3829-025-Q6-N6-D12.pep
ERRFKRPLVNSFCLRITVIPVYSFTTSFFFFEELQTLVKVIELPTQWFQIYVFAVSITSCKPYKRILFPHSPVAILHTHLRGLWPPRDKK

SEQ ID NO: 110009 - protein, 51 aa, Gossypium hirsutum
  Clone ID: LIB3829-025-Q6-N6-F9.pep
HKSSVIKKQNGIPENSPPSYGDWDQTVPVWHKQFINRTLNSAGTVKTGTIK

SEQ ID NO: 110010 - protein, 104 aa, Gossypium hirsutum
  Clone ID: LIB3829-025-Q6-N6-G11.pep
KVITTSNCSDQSLGVGRDDGEGSEHDHAAASTHSSSDSRQRRFDTSSYRQRAEALEGLLEFSARLLQHQRYDELGVLLKPFGTEKVSPRETAIWLAKSFKETQA

SEQ ID NO: 110011 - protein, 65 aa, Gossypium hirsutum
  Clone ID: LIB3829-025-Q6-N6-G2.pep
QLLRLLPPICDHPDSCRVPLCRQFKVKAQPQKMGDYAKCKLLVKKVLSPTAIASLALATAPKRKI

SEQ ID NO: 110012 - protein, 134 aa, Gossypium hirsutum
  unsure (1)..(134): unsure at all Xaa locations
  Clone ID: LIB3829-025-Q6-N6-H11.pep
TQREGPRPSRTEQPNEANSSTATTAVTGAASNTESRSFWHGHRFRNFRPAGMEVANVKSGLXHLNAPPTENSFRAQSSPPPQKRKKNKNGPKIKPCCWMMSNGISQSLVMVKRIKHLFLQKKKKKKNPQARPXR

SEQ ID NO: 110013 - protein, 140 aa, Gossypium hirsutum
  unsure (1)..(140): unsure at all Xaa locations
  Clone ID: LIB3829-025-Q6-N6-H12.pep
PLLRVGNRATGACVASSPASDXKAVSHNTAHGSFSPLPFEPSAMTNCSTQRKLSGYXQLLLRRGHHKGKTNLAYDCLHPAQETYCLLNKASLVENGSTRMPXADMVGSSRNVVMNTSPSQPIYPCAYWKNTYTFRFNRSD

SEQ ID NO: 110014 - protein, 103 aa, Gossypium hirsutum
  Clone ID: LIB3829-025-Q6-N6-H6.pep
EANIKKLDPNTDIKGPPAPALFLNSETVKRDLMLFQEWRYYQFDMRCHQRDGMPLALIFAINTDPFYSSLLIPIWIETHRSLLIYSDMAGSRISEQGLSDTIS

SEQ ID NO: 110015 - protein, 65 aa, Gossypium hirsutum
  Clone ID: LIB3829-026-Q6-N6-A7.pep
REKGLLALYANFSPAQPLAPFLFYFFPQKTMPLRAWGVFGGKGTLFEDWASRTIFSSWAGPQTTG

SEQ ID NO: 110016 - protein, 110 aa, Gossypium hirsutum
  Clone ID: LIB3829-026-Q6-N6-B1.pep
NGLNSEYGANIFIAANTQLQTSDFVTNPGAYGFTTSKIACCGQGPYNGIGLCTVFSNLCSNRDEYVFWDPFHPSERANGIIVNNIVSGSTNYVSPMNLSTLLALNSDTRN

SEQ ID NO: 110017 - protein, 77 aa, Gossypium hirsutum
  Clone ID: LIB3829-026-Q6-N6-B11.pep
GSFPHHQRPLAFNNKHTNSWDLNNLKRKKEEDKTESQGENDQLLKKHVGLTKHNNTVGHNRLNSGGRFKPKGTNHSN

SEQ ID NO: 110018 - protein, 76 aa, Gossypium hirsutum
  Clone ID: LIB3829-026-Q6-N6-B2.pep
KKSYSFAIFPSLLHFYRLKKSGWGLKVLYRRWGTKTKSRLLSKIDLWKLAETGSGNFLFLFNISTVELSQKLNCGC

SEQ ID NO: 110019 - protein, 62 aa, Gossypium hirsutum
  Clone ID: LIB3829-026-Q6-N6-B3.pep
TMFCHMKLLMQSDYIVLVASMLLDLLLTFCLWCFLSSYFAQYFYNDQVLFFFWRYFRHYLTA

SEQ ID NO: 110020 - protein, 142 aa, Gossypium hirsutum
  Clone ID: LIB3829-026-Q6-N6-C2.pep
GFPTDLHPQTRALFPTCTGSSLVEGSVFSTGMTHARELQKLGGRIRVRGSNALVSGFDEGSALEGSGVIARDLRGGVSIILAGWGAKGPPQIHDIAHIERGSENIAMKLQNLGGDIQRLTPPGAPFFIPFFHFKQAPRFAFH

SEQ ID NO: 110021 - protein, 122 aa, Gossypium hirsutum
  Clone ID: LIB3829-026-Q6-N6-C8.pep
GSLCQPFLEASSSGDNSRKMFSDELNQAIDSDRALSLLSSQPAETREIGLSPMVQPASASFVIPNLQFNDVGGMGGEPIGTSILDADGGGNNSHLQGHEMFQNEHFGSSATGAHHTLSFSWE

SEQ ID NO: 110022 - protein, 59 aa, Gossypium hirsutum
  Clone ID: LIB3829-026-Q6-N6-D12.pep
LFRLHQKTGGIVFGHNVRWRYSPIYRNGVGSGSIGNLVEGEHTTNPGPVYPFLSLEHKS

SEQ ID NO: 110023 - protein, 134 aa, Gossypium hirsutum
  Clone ID: LIB3829-026-Q6-N6-D2.pep
LTVEVLPFPVNSLLCKVRSLRISGYCALNQCVCGFIRFCMFHTLGNRGPWDVTMCGLFGTIHEGVGYITFGQCFVIQSPQFFRSNPFPPYAPDSVLKQAKNGVPAMDSLARLVLFHILGCCVFLLGTDCSDQFL

SEQ ID NO: 110024 - protein, 58 aa, Gossypium hirsutum
  Clone ID: LIB3829-026-Q6-N6-D6.pep
WSKVIWSHAVAYWLSFLLRSGIKVLDLTRVLKPGNYKKLNRNSYTCVSLAYILYASTL

SEQ ID NO: 110025 - protein, 106 aa, Gossypium hirsutum
  Clone ID: LIB3829-026-Q6-N6-E1.pep
LGLKKSGTVVQRMHLVKVGPSMDLVVESHGLPSEGLRNEAMKPANVQRKKKVNTVSSDTIQGPIGEIYIPEHKVGKMALPNKAKGVKRELREAKNKDANDTCLGGQ

SEQ ID NO: 110026 - protein, 83 aa, Gossypium hirsutum
  unsure (1)..(83): unsure at all Xaa locations
  Clone ID: LIB3829-026-Q6-N6-E10.pep
NGSEKDPDCSRSVPGSSITDHLNYSGVDLTFXRWRSRRIVMNPRVEEYEKTDDKGNIVLSRDPATLVPRINSLSNGREATYNA

SEQ ID NO: 110027 - protein, 72 aa, Gossypium hirsutum
  Clone ID: LIB3829-026-Q6-N6-E11.pep
GQDVISISRNKIGLSSLANSADEDGQHRIIPQKLYSSDHGSRNVSVLSSISIIPFSRLFLVGTEDGYLRICC

SEQ ID NO: 110028 - protein, 98 aa, Gossypium hirsutum
  unsure (1)..(98): unsure at all Xaa locations
  Clone ID: LIB3829-026-Q6-N6-F10.pep
KFVLRALSQCMAREFQPLGVHVAHVIIVEVIGSPRGAAASHRGLCWESSAKRQSRREXGSWMIMDPYALAQSSWCLHVQDRTAWTQEFDLRPSISTFY

SEQ ID NO: 110029 - protein, 61 aa, Gossypium hirsutum
  Clone ID: LIB3829-026-Q6-N6-F2.pep
FFFFFFFFFFFFFFFFFFFFFFFFFFFFFFFFKKQKKKINFKRGGEKGKPKGEKTGKKQHV

SEQ ID NO: 110030 - protein, 120 aa, Gossypium hirsutum
  unsure (1)..(120): unsure at all Xaa locations
  Clone ID: LIB3829-027-Q6-N6-A10.pep
PPPPPGVPXSPPPGTPSSPPTPGPPPPPTRGTPPPGFPPPPTTGPPPTGPSPGIPSPTPPPGTPPGSPPVFGGGPPPLGPSGTPPGTNDPSHAVPLFPSPTNNIFFPLAVPLWILANYWA

SEQ ID NO: 110031 - protein, 71 aa, Gossypium hirsutum
  Clone ID: LIB3829-027-Q6-N6-C2.pep
PRFRASLVAFQPAPPWRFLAPACPGRRPSGSPLGPAVLLLFYYRIIHIINSKTNIFDGFFHEKKINTIKYL

SEQ ID NO: 110032 - protein, 150 aa, Gossypium hirsutum
  unsure (1)..(150): unsure at all Xaa locations
  Clone ID: LIB3829-027-Q6-N6-C3.pep
VLFCTLRAFRGPPAFFAVFFFLNPFFLVVFAAGAFVPPPAGVFCXSHPFSVVPVTRVPRGLHGHFFGFYIVGSPRGGSLKVSFPVGFFWGLGPSLEWFRVLTLLFPGFFAPQPGLNFGGGLKKLPSFLGFESPPRGDFPCGFGNYFCLLP

SEQ ID NO: 110033 - protein, 104 aa, Gossypium hirsutum
  unsure (1)..(104): unsure at all Xaa locations
  Clone ID: LIB3829-027-Q6-N6-C8.pep
SLYPICWINLSSLKYLDIDACSIESLPAGLKNLSSLETLRLDQCHSLVCLPVNGLQGLSSLCSLKIGDCQTLASLSEGVXYLTALRDLQIKDCPELTSLPICCA

SEQ ID NO: 110034 - protein, 145 aa, Gossypium hirsutum
  Clone ID: LIB3829-027-Q6-N6-D10.pep
WVPPLLTQPVCGGPLFPPGVGLKWREKKGVLCWGGEQGPFSPPRVGPPRGFGPVGGFPRGWVGKKEKPRLKKKGGAFFFLGSQMAGGFKKMGGFLNPAPGGNPGFSFSIFFPPLFRIGFSFLLGGAFFFSLFQRGGPLVFSEGGS

SEQ ID NO: 110035 - protein, 156 aa, Gossypium hirsutum
  unsure (1)..(156): unsure at all Xaa locations
  Clone ID: LIB3829-027-Q6-N6-E7.pep
PRTLFGCHEKACVTRFXRDAQLFNXKIXEAAPNLLKQQPDFNIVVFHISKTLIYVVNGHSKYGFVESTREXCVSGTVWLNEFLSNSDSFVTCSQSCQHLXWDSVHPPQVGKQVQAXTFIGEGIPLLWFARTPCQHALFILWKDLAPLPFRLCLSKK

SEQ ID NO: 110036 - protein, 83 aa, Gossypium hirsutum
  Clone ID: LIB3829-027-Q6-N6-F1.pep
KPRMPMNPPDGPSPCHQIFNGQANKGMLSKTGFEYQQQVSLEMRPVGAHMPNFFIPMEQQSQQCQRPGFRRCGAPNDSKQPNA

SEQ ID NO: 110037 - protein, 72 aa, Gossypium hirsutum
  Clone ID: LIB3829-027-Q6-N6-F2.pep
NMLPFSVLWLCYLFLLIVICGALLLYYLDILISFFLCRHSSELPIVQVAFQYTVVVPPEELSSLGLVSSSMT

SEQ ID NO: 110038 - protein, 60 aa, Gossypium hirsutum
  Clone ID: LIB3829-027-Q6-N6-G10.pep
GGLRIRITQTNSVCDIMVKWLKKVTMVGENSTGIRGALFFVSLGRVVQKMVFPYILEYQG

SEQ ID NO: 110039 - protein, 85 aa, Gossypium hirsutum
  Clone ID: LIB3829-027-Q6-N6-G4.pep
NDSQISSESRHGSLTYPIMHVSLTSIGQPAMNAIPQGFQHALPVNWQIVQQEDASPKSRMHTSDVDDRFREFLLLKAPYDVGFYS

SEQ ID NO: 110040 - protein, 99 aa, Gossypium hirsutum
  Clone ID: LIB3829-027-Q6-N6-G7.pep
FLPPRQTIFFCFRKRGLGFSVNVPGPSPKDFLDLVLVPPSFSPLKKIGGAFKSPPVFFPPGPGPVCVFPPQICFGLLPAPPPELFFFFFAQPNPPFVFF

SEQ ID NO: 110041 - protein, 62 aa, Gossypium hirsutum
  Clone ID: LIB3829-027-Q6-N6-H7.pep
LNREISYDRYFTISTRSSIRHRNRCDETENVSVIAIGPMLEIQHKRLALEFSDMSGRTHQIV

SEQ ID NO: 110042 - protein, 131 aa, Gossypium hirsutum
  Clone ID: LIB3829-028-Q6-N6-A3.pep
MDNLAAIVAATFRLERSGSAKKRQQELLKRPRATQPVNERSAGSVFRNPVNLGVSAAELIDKAGLKGCSIGGAMVSNIHANFLVNNGASTSQDMLNLIALVKDKVDSKFGVQLEEEVLYFHPYWNYANWER

SEQ ID NO: 110043 - protein, 144 aa, Gossypium hirsutum
  Clone ID: LIB3829-028-Q6-N6-B1.pep
QSQSTSGASSIAQKAGVAALGLGCAGGEAISTMVEAFRERRDFLVKSFGELEGVKISEPQGAFYLFIDFSSYYGIEAEGFGKIENSESLCRYFLDKAQVALVPGDAFGDDSCIRISYAASLTTLQAAFERIKKALISLRPAVPV

SEQ ID NO: 110044 - protein, 85 aa, Gossypium hirsutum
  Clone ID: LIB3829-028-Q6-N6-B10.pep
IISSLTGPVASMYGFYMEWALLPYLKKKKKRRAARPFFFFFFVKSIPYYTQQSGIQSSPTIFFLSPHQRKTKPNQQHKANGNGVS

SEQ ID NO: 110045 - protein, 84 aa, Gossypium hirsutum
  Clone ID: LIB3829-028-Q6-N6-B4.pep
LEMEILCRVKVRLEIFKRPFFGLESRKARNLNKRWQRVHKHSVIYIPISKVKEKLVLGFAKINPRPGAGFCFLKMQSPLVYDII

SEQ ID NO: 110046 - protein, 86 aa, Gossypium hirsutum
  Clone ID: LIB3829-028-Q6-N6-C6.pep
FIQGKHVGGVEEIKQLNENGELAKLLKGFPVRDPGVVCEGCGDARFVPCPNCSGSKKVFEEDECRLRRCPDCNENGLIRCRACCSW

SEQ ID NO: 110047 - protein, 92 aa, Gossypium hirsutum
  Clone ID: LIB3829-028-Q6-N6-D1.pep
HRWPSSGCKVIQYPRGVRVATTVSISVQQHALSLYSSHFKRCSLERLKLYFCLNLVHGDMDPILRKNRHISHLYQILKAIYIYIIIIEEFIS

SEQ ID NO: 110048 - protein, 75 aa, Gossypium hirsutum
  Clone ID: LIB3829-028-Q6-N6-D6.pep
FFFFFFFFFFFFFFFFFFFFFFFFFPGKSANRRENFSPVSTNPQKIFPGKSFPKKGKLFPEIFLGKIFYGQKNSP

SEQ ID NO: 110049 - protein, 134 aa, Gossypium hirsutum
  Clone ID: LIB3829-028-Q6-N6-F3.pep
KKCGGKNFCPVKARPPLLFKWVGANGSIKPKRMVLGIFPWGEWAFPALAIWEAWMAVAWPIFRPPVPIKSQKFRSPFGQTFPRPMGILTRRGKVRGLWKKRDPMLAPYVFVCCPIYPPIFVKPLNFPKGAVCLN

SEQ ID NO: 110050 - protein, 88 aa, Gossypium hirsutum
  Clone ID: LIB3829-028-Q6-N6-F7.pep
AKGGAPPPGGLKRGQRGKNRGKKKKPGANFMGEGKKNHPRGSPYTEKFPPPFKIKLDFLAGPPKNGFPQVGGEGPKKKRSPWFLNPGL

SEQ ID NO: 110051 - protein, 45 aa, Gossypium hirsutum
  Clone ID: LIB3829-028-Q6-N6-G5.pep
IAHFDCPFHAPIDFFSFKLPIKHTQIIDINFVNNVQTCKQSSLCG

SEQ ID NO: 110052 - protein, 140 aa, Gossypium hirsutum
  Clone ID: LIB3829-028-Q6-N6-H1.pep
RKRRPLFCGSASMSTNALLQKAALMGAAASTGSLNSPLMGKSYTTPGILEQNNAFFKSVQSSPPRTAGLSGFSADTMTVAFLGIGGSRPRNLLEKQHRHHHHHPHQPQQDLEQFGGIGPARLQGLSHFPQHAVVGETNRG

SEQ ID NO: 110053 - protein, 71 aa, Gossypium hirsutum
  Clone ID: LIB3829-028-Q6-N6-H7.pep
QRWKRLKKAEENDAREATLSSTSVGKNFLDAANRSIYGAEKGGSSTIEESVRRRAHYSQGRYESEGNAFRR

SEQ ID NO: 110054 - protein, 92 aa, Gossypium hirsutum
  Clone ID: LIB3828-027-Q6-N6-E5.pep
TPGFLFLERASKKGPGFFAIPPFPGIADRMTKEIPAFAPSGLKIKVVAPPKKKTRVWIGGSILASLGPFPPMWVPKPGFGESGPPLVLRKGF

SEQ ID NO: 110055 - protein, 72 aa, Gossypium hirsutum
  Clone ID: LIB3828-027-Q6-N6-G5.pep
YRGGAIYGHFTRRKVNRWVGGAIYGYPLGVPKGASPLGFMEKTLKHLQGNPLGALIWARNWLILGNSKVNNP

SEQ ID NO: 110056 - protein, 70 aa, Gossypium hirsutum
  Clone ID: LIB3828-028-Q6-N6-D5.pep
STRFWGGLLLSILATTSTILDHYLRHINEGFAIGFTSILIIVGSIIELRRSYQAYNVMPSLSKALRRYGV

SEQ ID NO: 110057 - protein, 110 aa, Gossypium hirsutum
  Clone ID: LIB3828-028-Q6-N6-D6.pep
RNDDELKEIGRHTKGYRVCNMIEGGVTPLHTPEELRAMGFHLIVHPLTALYASARALVDVLRTLKENGTTRDHLHKMATFEEFNQLVKLDSWFELEARYSNQKSPMRVKS

SEQ ID NO: 110058 - protein, 67 aa, Gossypium hirsutum
  Clone ID: LIB3828-028-Q6-N6-F6.pep
LTCTIGFREDRGLSPHCKNNLTSLEFWEAKKILKSIHSNFSPSCVLIFCRGVLFILWSFSVSTFFLF

SEQ ID NO: 110059 - protein, 115 aa, Gossypium hirsutum
  Clone ID: LIB3828-028-Q6-N6-G5.pep
DYIRVSMDCKHLLFRIFVENPGKRISITEIKSPPWFLKNLPMELKEGGNWESHDVNNPSQSLEEAQFIIREAMKTPEVPKGGELFLGGSMDLDDDLDGDEDLENVKSSGDFVCPL

SEQ ID NO: 110060 - protein, 93 aa, Gossypium hirsutum
  Clone ID: LIB3828-028-Q6-N6-H5.pep
LVGLKYLDISECVNLKCLPKEVGKLVSLEKIDMRDCLQIVNLPTHAALSNLKSLQRVICDDEVFGQWRNLEKTVPNLHVQIAEKWYSLDWLNS

SEQ ID NO: 110061 - protein, 53 aa, Gossypium hirsutum
  unsure (1)..(53): unsure at all Xaa locations
  Clone ID: LIB3828-028-Q6-N6-H6.pep
KKKKKKKKKKKGGPPFXFFFYFFFYFLFFLLAQKNNFFYACSCLNFLWVQNKI

SEQ ID NO: 110062 - protein, 64 aa, Gossypium hirsutum
  Clone ID: LIB3828-029-Q6-N6-D4.pep
ITTTFFYKEQSLTLYSFAPSRSVCKSGLDFKVVVSTLQEKIFLNPYYLFRALEQNFLFSQFLLD

SEQ ID NO: 110063 - protein, 80 aa, Gossypium hirsutum
  Clone ID: LIB3828-029-Q6-N6-D5.pep
PMVTMQLAKFPSSQSSADSPASITPQVSAIELSSSVAGSSTSSLYEAVSTAIHWLFWGRSHIKSPIDRFSPLMWKSSKDN

SEQ ID NO: 110064 - protein, 130 aa, Gossypium hirsutum
  Clone ID: LIB3828-029-Q6-N6-G4.pep
SHTSTSNTTPPRSFDTSSSHQDVGFKETLPGQVRAPAVFKCVRVTAVEGGEDEYAYQAVVKIGGHVFKGFLYDQGVEGRDGFPNISELHLGGGGRNAGSSSSPVLDPSDVYAATGGGFLGGGLGYGNPIN

SEQ ID NO: 110065 - protein, 140 aa, Gossypium hirsutum
  Clone ID: LIB3828-029-Q6-N6-G5.pep
LTIQPNVLNMTFRNFVEIIFENHEKSLQSFHIDGYSFFAVAVEPGTWSPEKRENYNLLDAVSRHTVQVFPKSWAAILLTFDNAGMWNIRSEIWERTYLGEQLYVSVLSPEKSLRDEYNIPENTPLCGIVSGLPKPSPYTI

SEQ ID NO: 110066 - protein, 114 aa, Gossypium hirsutum
  Clone ID: LIB3828-029-Q6-N6-H4.pep
AQKIKTKIIKQSSFFFTNPNLKPKFTTQLQRPKCLNPSPLVQNKAKKKTSLQASCAAATRVFPRACCASACVRLLQLTLYLHEIAPSEPCQFRPKWSWMGFGLVQRRREREIFF

SEQ ID NO: 110067 - protein, 103 aa, Gossypium hirsutum
  unsure (1)..(103): unsure at all Xaa locations
  Clone ID: LIB3828-030-Q6-N6-E4.pep
XIFFLKNHEGVFPYCFGRGASRGGVFSGPKAAPPPKFFTPLGYSSCLNGAKNPPPPAGCSPKMKDPPPCFCGSLKIEVVPRVFSRVEFAKMAKLCGVSFSSPR

SEQ ID NO: 110068 - protein, 69 aa, Gossypium hirsutum
  Clone ID: LIB3828-030-Q6-N6-H5.pep
MGAIAPVFDPLRGFPKASVLLSKNSPKPVPKNFSKVAPRPPMGFVVLGFVGFFVQLFFFPLSTFFFGPG

SEQ ID NO: 110069 - protein, 195 aa, Gossypium hirsutum
  Clone ID: LIB3543-007-Q1-K6-B2.pep
MERGDGFNRFYKHAKSSSGLSIMHGDSSNSNTNTNTIINNNAANNGNAANSNTMPPPCMVREQDQYMPIANVIRIMRRILPTHAKISDDAKETIQECVSEYISFITGEANERCQREQRKTITAEDVLWAMGKLGFDDYVEPLTVFLNRYRENENERTSLRSEPMLKRGIDYGPSMMMAPYGAGFHVGHQQGIFDG

SEQ ID NO: 110070 - protein, 147 aa, Gossypium hirsutum
  Clone ID: LIB3543-007-Q1-K6-C3.pep
MNTEVKEVDKKLSREVNGSNPKKSSAEEKSELARQILLSFIVRSAKQNMDGECEALINDKRLNHSQNFSDAVTSDTAIIKILYGNEGKDLDSQSSSNEEPKALDINNKKPGDGEGFTVVKKRRKNRQQLTNGVTGLYNQQSISASVR

SEQ ID NO: 110071 - protein, 182 aa, Gossypium hirsutum
  Clone ID: LIB3543-007-Q1-K6-C4.pep
MKNMLKSLSLNWAFNSMAWKGLVYTAFILNFVLICQHLLLQPLVSALDENLGNAAELFERVSQSIKVKRYSEALNDLNAAIEADPALSEAYMRRASLLCQLCRYEESEKSYKKFLELKPRNSVAEKELSQLHQAQSALETAFGLFESKDYTKALDYVDKVVLVFSPACSKAKMLKLKLLLAA

SEQ ID NO: 110072 - protein, 209 aa, Gossypium hirsutum
  unsure (1)..(209): unsure at all Xaa locations
  Clone ID: LIB3543-007-Q1-K6-C6.pep
LSTFPSLPEPKLSQYHGTITTFGPSNGSSMETLSGSQFLWGNSNSYTDQTNPSVWPKSSMGHPFSSNGKGHGFPYSGQQVSFSGSSPHYGHHHIGSAPSGVPLGRHFGFFPKSSDTSLTNPAAFGGLGVGQNNRGFMVNRGSRAATSSGISIPWNVSENSSSMRMMSLPRLSPVFLGNGPFQXLHNSMEGLAENGRSRQVENNGNQLDN

SEQ ID NO: 110073 - protein, 75 aa, Gossypium hirsutum
  unsure (1)..(75): unsure at all Xaa locations
  Clone ID: LIB3543-007-Q1-K6-E3.pep
YXNRNYVTTLDISIRKIASLLLHCTVVXALANKNNSHAPRFDLDPSSKKGTQQRFQTKSMMQESNLSELKDLLGR

SEQ ID NO: 110074 - protein, 64 aa, Gossypium hirsutum
  Clone ID: LIB3543-007-Q1-K6-F6.pep
LKEYHQRETSGTGATSPGQKLPMPPTTRKWNSGDPNTILRVLCHRNDREANQFLKREFQLPKRK

SEQ ID NO: 110075 - protein, 141 aa, Gossypium hirsutum
  Clone ID: LIB3543-007-Q1-K6-G6.pep
MHAVKGGWVGQTFALAKCNESGGKKTRVRRSKEERKSMVESFIKKYQESNNGNFPSLNLTHKEVGGSFYIIREIVREIIQENRVLGPAKLTEGEHDIDRFLQQNPLGSISTPPEPLLSEQSNGSSFVPSHHEDESDESVMI

SEQ ID NO: 110076 - protein, 73 aa, Gossypium hirsutum
  Clone ID: LIB3543-007-Q1-K6-H2.pep
ISFGSSTFRPCICHVSDEDLDKSSKVPCILHMDSIKGNHAGLKNLVQRYPQAFTIDLFNLINACPCKIPLLFH

SEQ ID NO: 110077 - protein, 80 aa, Gossypium hirsutum
  unsure (1)..(80): unsure at all Xaa locations
  Clone ID: LIB3543-008-Q1-K6-A1.pep
MSDLVARTGRLQQRYEAGFRLVAGCIPFRYRSTNEADDVKFGKVVEVLMINSTSGPGLLFPXGGWENDETVEEAAVREAI

SEQ ID NO: 110078 - protein, 94 aa, Gossypium hirsutum
  unsure (1)..(94): unsure at all Xaa locations
  Clone ID: LIB3543-008-Q1-K6-D3.pep
PSVRPASAQRPPTRXEKKKKKKKKKKKKKKKKKKKKKKKKKKKKKKKKKKKKKKKKKNKEGGGGVLEKQKQKKKLKGRGKKKKIDRKKKMGNRT

SEQ ID NO: 110079 - protein, 80 aa, Gossypium hirsutum
  Clone ID: LIB3543-008-Q1-K6-D6.pep
NISFILFFPISISLFIFGFSRKSHHQIQRLLTCASTFHCLLPMAHDSVQLPCDGDGACMRCKVTPLAEETLTCSTCATPW

SEQ ID NO: 110080 - protein, 56 aa, Gossypium hirsutum
  Clone ID: LIB3543-008-Q1-K6-G1.pep
SRTPTPLFKPRTSSCTQADELITKFVFHCSHEWTVSAPFFLYSANWFAIIPLINLS

SEQ ID NO: 110081 - protein, 201 aa, Gossypium hirsutum
  unsure (1)..(201): unsure at all Xaa locations
  Clone ID: LIB3543-008-Q1-K6-H1.pep
SKHSIESKXSKNKNRCLEGFYEEQSIVKEVSVGNLVSVAVRKSPETGKVIVCLETDIPGDVVVHWGVCRDDAKIWEIPAAPYPPETTVFKNKALRTLLQPKATGNRSGALFTLDEEHFGFLFVLKLDDNTWLKFKENDFYVPLLGTSSVPGQYGQSDSTSEEISSKSYTDGIINEIRNLVSGLSSEKSQKTKKKEVQESIL

SEQ ID NO: 110082 - protein, 190 aa, Gossypium hirsutum
  Clone ID: LIB3543-009-Q1-K6-B3.pep
GRVGANECAAGGWTKGGSQNQSDGWGKQHGGSSWGGGASQNAGQNSSWNSGSGNANQDSGWAKKNDSDFGSGDATKDSSWGKRSDWNSGSADANQESECGKKSSWGAGSNNAGQDSGWGKRGSWNSGSGSANEDGWAKKNDSNFGSGDATNDSSWGKKGSADASQDSNWGKKNWGTGNDAGQDSGWGKKD

SEQ ID NO: 110083 - protein, 85 aa, Gossypium hirsutum
  unsure (1)..(85): unsure at all Xaa locations
  Clone ID: LIB3543-009-Q1-K6-C4.pep
RPGKGRVERGAEAGESVFGVSDQVRRSAVEVCGXXSLECSSPFLCGSFFFAKFTLKTAKNSMVLKKYKTRNEKKKSLGSSTLISX

SEQ ID NO: 110084 - protein, 212 aa, Gossypium hirsutum
  Clone ID: LIB3543-009-Q1-K6-E1.pep
DFWTSHECLLLPYEQALTPEDSTTGLYYDCSAHMLWVGERTRQLDGAHVEFLRGVANPLGIKVSDKMDPSELVRLIEILNPRNKPGRITVIVRMGAENMRVKLPHLIRAVRGAGQVVTWVSDPMHGNTIKAPCGLKTRSFDAIRAEVRAFFDVHDDEGSHPGGIHLEMTGQNVTECLGGSRTITYNDLGSRYHTHCDPRLNASQSTQLAFII

SEQ ID NO: 110085 - protein, 79 aa, Gossypium hirsutum
  Clone ID: LIB3543-009-Q1-K6-H5.pep
GNQYYLRLMSMWDTEPMNFEFWAFSSPEIETQANKSSWETFFTSGGYVAQLLLTFIMNIQYKYACILGLWEMTTQTDDE

SEQ ID NO: 110086 - protein, 72 aa, Gossypium hirsutum
  Clone ID: LIB3543-010-Q1-K6-B2.pep
TFGVFFFLFLCIVGLVGVFCYKKEEARLSSCCTASFLPFLFEFMKQLFYRKKKKKKKKKKKRKKKKKRSKIM

SEQ ID NO: 110087 - protein, 66 aa, Gossypium hirsutum
  Clone ID: LIB3543-010-Q1-K6-C2.pep
KSFPSASSSQSIKSFETQIVHILLYQLNTNEREIIVGLGLYFLLNINCMLVEITCNMQEPNCLHSS

SEQ ID NO: 110088 - protein, 216 aa, Gossypium hirsutum
  unsure (1)..(216): unsure at all Xaa locations
  Clone ID: LIB3543-010-Q1-K6-C4.pep
QRPLAVERIALNLRYPSGVVKHVAVEEEFDNVLSMTDIVIYGSFLDEPSFPEVLTKAMSLXXKPIIAPELSNIRKYVDDRVNGYIFPKENIKVLTQIILQVISNGKLSPLARNIASIGRETVKNLMVQETVEGYAFLLENVLKLPSEVAPLKAVAELPSKLKEEWQWNLFGDFLNFTLEDRSANFLNKLEEQWNHSRREKFGSLIAVDDSFXYEIW

SEQ ID NO: 110089 - protein, 180 aa, Gossypium hirsutum
  unsure (1)..(180): unsure at all Xaa locations
  Clone ID: LIB3543-010-Q1-K6-E1.pep
ELQNHNCRRRRRKTNKQSAGNGRGRGGGEGRRRKGSSGFQQFETSSSGGDSGNDNQEVDGEKLDQPREVRRSMRTRNPVNYTVKDLEDEGGLSHKESSGEDAMEKEAGEDVKEKIQCEAREPSLDNIYGDYLETGGGFCMDERGTDLPDANQDVDLETEPTNDYLKMGGGXCMEGDIDQP

SEQ ID NO: 110090 - protein, 130 aa, Gossypium hirsutum
  Clone ID: LIB3543-010-Q1-K6-E3.pep
MSSQNPEPEQSPDPKALKDPELKQPSEEPPNQESKVEGEGKEEEEEEGECGFCLFMKAGGCKESFVGWENCIREAEENKEDIVEKCFEATSALKKCMEAHADYYEPILRAEKKAEEQAIIELEKEKKRRV

SEQ ID NO: 110091 - protein, 194 aa, Gossypium hirsutum
  Clone ID: LIB3543-010-Q1-K6-F6.pep
MEDDDEFGDLYTDVLKPFSSAAAPPLQPSTPTHFHRPIDSNPQSQGGDDDDILFGRSRSIPDTQNLAPLKFHPVLPPAVAAAAALGSIPNSAPEPMVLDSGKEVVFDIEEGGSKEIEDSGLDDPIIPGLTDSVRQEDSGRNDDGGDGGLRDSGQVEAEADGEGDDWDSDSEDDLQIVLNDNNHGPMAMERGVIG

SEQ ID NO: 110092 - protein, 54 aa, Gossypium hirsutum
  Clone ID: LIB3543-010-Q1-K6-G1.pep
PNGRKKMSMNLMPLNHGRMRMNTNLLRLLVHMHRDRRPLRSFIKMLLTLKSDIY

SEQ ID NO: 110093 - protein, 190 aa, Gossypium hirsutum
  unsure (1)..(190): unsure at all Xaa locations
  Clone ID: LIB3543-010-Q1-K6-G3.pep
CFFNIFITLKPAKRKSSHSCKFNLVSFLSGTCISPPPLTHSSPPIASHKTTGKLQQTLAGCIEXRXKTRQSGKVSKVKIWPGFTGQGRYFEFHSNLIPASIDFVXESLLCTSLCKDGYKIQTVEHLLSALEAKGIDNCRIQIQSLDSEDTEVEVSAIIFVWISKLIFNLLKIVSFVIHLIVTFVTFFPFC

SEQ ID NO: 110094 - protein, 49 aa, Gossypium hirsutum
  Clone ID: LIB3543-010-Q1-K6-G6.pep
RDDSSCFRFSFKHSRQKKRDKTLKAKELYTILIRLAREKQIKSVEKKPN

SEQ ID NO: 110095 - protein, 151 aa, Gossypium hirsutum
  Clone ID: LIB3543-011-Q1-K6-A2.pep
MAARETFNVTAASPSTIPHSPWHSPVPYLFGGLAAMLGLIAFALLILACSYWKLSGYLENGERGEGDRDLEAGDETQKGGAPVMEQKFLVIMAGEVKPTFLATPISSSRSSSFGDKSCCCGEKGEKLEEETTSGDAEDQHQQPPTQETQHH

SEQ ID NO: 110096 - protein, 60 aa, Gossypium hirsutum
  unsure (1)..(60): unsure at all Xaa locations
  Clone ID: LIB3543-011-Q1-K6-B5.pep
QRPPRVRKLSTWILPLXEKPLCTYCLYGSHLSCKSLYGEDSLVITLMYSGFGIVIGRKPR

SEQ ID NO: 110097 - protein, 64 aa, Gossypium hirsutum
  Clone ID: LIB3543-011-Q1-K6-D1.pep
RYKHRCTYPANQCDRNIQRRESATDLPWVSDNYRNMLVMLILHHLFLKQLHAECSIELANDMQT

SEQ ID NO: 110098 - protein, 107 aa, Gossypium hirsutum
  unsure (1)..(107): unsure at all Xaa locations
  Clone ID: LIB3543-011-Q1-K6-E5.pep
WVYGNENSYVPSSNAGTKKTCEPYGTPDQIHPDEPYNKIPACLTHYLDSYFYCRTNAYRNTESGYETRFTEIGMTSKXTYNYNGNYYNGNKEVLFTVERGCTKAKPK

SEQ ID NO: 110099 - protein, 118 aa, Gossypium hirsutum
  Clone ID: LIB3543-011-Q1-K6-E6.pep
PNVRRTETQDVIALPVPTLLCLTISFWAFDASFLVQYSKDLLSASARLPTLIPDCRVDGAPCLGFIGHGSGEGHYCRTVTLSLRYRWCYQNLVYTQKAMKSKALYYIRHMSLTCEIMC

SEQ ID NO: 110100 - protein, 95 aa, Gossypium hirsutum
  Clone ID: LIB3543-011-Q1-K6-F3.pep
ELIDGLVVPGKGCGIILKDHVNNRERNAQFCNQIVCSGRLNSMKGTLNGCSEKLNISCLFTGLTSIGKEIIVSFFKVYSAPINSRKFFTNPQKKL

SEQ ID NO: 110101 - protein, 76 aa, Gossypium hirsutum
  Clone ID: LIB3543-011-Q1-K6-G5.pep
CGSSVNHFLEPKLGIFFILGHELFFLFKLSLKLDNYFCIMARGVHSVNRPVNRPEITITELTALPKILPVNRPDFF

SEQ ID NO: 110102 - protein, 154 aa, Gossypium hirsutum
  unsure (1)..(154): unsure at all Xaa locations
  Clone ID: LIB3543-011-Q1-K6-H2.pep
LPVLFQGTVADNIRYGPNLRGKKLTDVEVSKLLTLAXDLDSSFLSKTGGELSGGQAQRVALARTLAYQPXGLLLDEPTSALDPISTQNIKDVIVKLXKKRRMTVVMGSHSIKQIXKVADVVCLLVNGEKFEILKPNELSVAKHPMGHKFLQLNS

SEQ ID NO: 110103 - protein, 71 aa, Gossypium hirsutum
  Clone ID: LIB3543-011-Q1-K6-H5.pep
VTCVVSCTKSFNWGGSPPIKECSFGGSTFRPSKTQCPYPSQSPLKTLNFNSSGREPTKDREGCLAPFSRYY

SEQ ID NO: 110104 - protein, 92 aa, Gossypium hirsutum
  unsure (1)..(92): unsure at all Xaa locations
  Clone ID: LIB3543-012-Q1-K6-A1.pep
GSDGYRXMVRGQXXSXSKKCXXGRKIFTGWRQQELLSRLLTHVPDESQSNLLEVSKSFLEGKTSLENYICHLKTSVGISALVEAVGIGKGKT

SEQ ID NO: 110105 - protein, 147 aa, Gossypium hirsutum
  unsure (1)..(147): unsure at all Xaa locations
  Clone ID: LIB3543-012-Q1-K6-A2.pep
VFSPGESSGDKVLTVPVQVSNVRFRLDNLGPQPGSRKKXKRPGRGISVGHGGRCGFGMRGPESRPGPSVTKGFVGGQMPLYRRIPPLTGIAGGLHAGLPKFVPAYLRAFAPAGFRDGDEVSLETVAKRGPIYPSGRDRKLPFKILGD

SEQ ID NO: 110106 - protein, 54 aa, Gossypium hirsutum
  unsure (1)..(54): unsure at all Xaa locations
  Clone ID: LIB3543-012-Q1-K6-A6.pep
VRGVLPTTARVSLRLPHLSRRMVDEEGIPGLRIKGFQEKIGESEIXXXKGNFGX

SEQ ID NO: 110107 - protein, 194 aa, Gossypium hirsutum
  unsure (1)..(194): unsure at all Xaa locations
  Clone ID: LIB3543-012-Q1-K6-B5.pep
PASDLTHKLEYIEPLMEVKPMEFEENLXYLPEFVNVSSKQRLVYIDIGASEHMNSNVSSWFFPSYPLDHKAFDVYFVDHNISVMLSYIKRPGINFVYYPGLAENRAALSSTNRDSDPFVEDEGFDFQLWFKDTVQYADYVVLKMNAGDVELQLLSDLFESGIICFIDELFLHCSDRTESGQAVKGRDCMESLQV

SEQ ID NO: 110108 - protein, 42 aa, Gossypium hirsutum
  unsure (1)..(42): unsure at all Xaa locations
  Clone ID: LIB3543-012-Q1-K6-C4.pep
PFLRNMQWVVNRFISISILIDHNTQAXHMCKTALFQIKHRTE

SEQ ID NO: 110109 - protein, 66 aa, Gossypium hirsutum
  Clone ID: LIB3543-012-Q1-K6-D3.pep
GSVKSKNFWFFFKGVGFHQVRKSFKKKKQMKKKELPLFFQEKFRLCKRFLVLVPKKAHKSFPRHAW

SEQ ID NO: 110110 - protein, 169 aa, Gossypium hirsutum
  Clone ID: LIB3543-012-Q1-K6-E4.pep
PGDKVFFDASVIWGLVGPKRIFGSLGEYSTLNWFFLGGLLGPVVVWLLHKAFPSQAWIPLINLPVLLGATGNMPPATPLNYTSWIIVGTIFNFFVFRYRKRWWQRYNYILSAALDAGTAFMTVLIYVALGVESKSLHWWGASPDVVPEHCDLATCPTAKGILVEGCPIF

SEQ ID NO: 110111 - protein, 215 aa, Gossypium hirsutum
  Clone ID: LIB3543-012-Q1-K6-G2.pep
PASAPRPRTRGQTLSLFCLLLFLLLTLSPSHAQLGVGYYHNSCPDVESIVKSAVKQKLEQTLVTAPATLRLFFHDCFVRGCDASVMLASSWKKSAEKDNPDNLSLAGDGFDTVMKAKAAVDSVPQCRNKVSCADILALATRDVIALTGGPSYAVELGRLDGRISTRASVRHHLPHPDFKLGKLKAMFASHGLTLTDLVALSGAHTIGFSHCSRFS

SEQ ID NO: 110112 - protein, 117 aa, Gossypium hirsutum
  unsure (1)..(117): unsure at all Xaa locations
  Clone ID: LIB3543-012-Q1-K6-G3.pep
LQVSILPPLASVFVTSIAAQFADNLIANGVETTTVRKICQAISFLSPATCMILSSLDLGLQPWEIVGFLSCGLALSSFALSGLYCTHQDISPEYASILLXGITNTVGAVPGNVGVAL

SEQ ID NO: 110113 - protein, 223 aa, Gossypium hirsutum
  unsure (1)..(223): unsure at all Xaa locations
  Clone ID: LIB3543-012-Q1-K6-G5.pep
FQPNXTPSFMGFPPTQFSTPDFSSSSDFQGPRLFTATENASAFSGGFEGFDASGNAVFVNRAKILKPLEVFPSVGSQPTLFQKRAAMRQGSGVADESGNLDVSDGKRKRHEQGEIEEASFDVSGLNYDSDDCKLEESAKNGGCNSNATSTLTAGGDHKGKRKGMPAKNLMAERRRRKKLNDRLYMLRSVVPKISKMNRASILRDAIDYLKELLQRINDLHTEL

SEQ ID NO: 110114 - protein, 168 aa, Gossypium hirsutum
  Clone ID: LIB3543-013-Q1-K6-B3.pep
GIGKKLVGKMLPPGASLPEDSLELDYSIAIEYKGPPVAYEVPRVEPLDVNSHAIPTAEALSESQRSVANTATLLIEPIPLPVSHIASVTSPRTQSPRVSASSESLVSVLQNPDFSSVSPSASPGSVGNPPSNPPKQVVNEGKRVPVVTFNTVEKVGWERYGYGKESLS

SEQ ID NO: 110115 - protein, 144 aa, Gossypium hirsutum
  unsure (1)..(144): unsure at all Xaa locations
  Clone ID: LIB3543-013-Q1-K6-C1.pep
KTITGMTTTLXVESSDTXDNVKTKILXNESLPXKHRQRVIFHGKQLDDGRTLADYNIQNESTVHXLVLNLRGGMQMFEKTLTEKTITLKDKSYDTIDNIKANIQDKDSMHPDQQRIIFALKQLEDGRTLADYNMHEESTLHIAL

SEQ ID NO: 110116 - protein, 167 aa, Gossypium hirsutum
  unsure (1)..(167): unsure at all Xaa locations
  Clone ID: LIB3543-013-Q1-K6-D4.pep
MAGTLITEAVLGAFLEGAVSKANSIVTNQISRIWNFKKELRRLGDSLEMMNAFLQDAREKANXMDAVKLWLQRLKDVAEEAADVLDEFDYEILRRKLKIRSQIRRKLVDFLSSNNSILFRLKMAKKIKDILETLEVVNREANEFGLQQRATEHVSPRRSNVDVLCHG

SEQ ID NO: 110117 - protein, 198 aa, Gossypium hirsutum
  Clone ID: LIB3543-013-Q1-K6-D6.pep
QHSTAAPTSAMGPAPPPPQRKKRNQPVRPNPDVEVIALSPKSLMATNRFICEVCNKGFQREQNLQLHRRGHNLPWKLRQKTTKEVKRKVYLCPEPTCVHHDPSRALGDLTGIKKHYSRKHGEKKWKCEKCSKRYAVQSDWKAHSKTCGTREYRCDCGTLFSRRDSFITHRAFCDALAQENARQPPSFNSIGNHLYGKY

SEQ ID NO: 110118 - protein, 76 aa, Gossypium hirsutum
  unsure (1)..(76): unsure at all Xaa locations
  Clone ID: LIB3543-013-Q1-K6-E1.pep
SSSAVWLLDIVYCRKPPQRLWLXRTQSFGSCHHLFGFNFKVRLQGSLGKPPARSATRLSFGYSGRTGTDAEGSAQT

SEQ ID NO: 110119 - protein, 100 aa, Gossypium hirsutum
  Clone ID: LIB3543-013-Q1-K6-E5.pep
MGIIRKNSNVSADGTLIKHPIIFQQNLGFHFRVMTPLRPSLFPSLDRKAVSTSRPCEINLQGSRLERVWKAAKDRTTNRAWWCILPVFMPTTSPHQGSRQ

SEQ ID NO: 110120 - protein, 202 aa, Gossypium hirsutum
  Clone ID: LIB3543-013-Q1-K6-F6.pep
PRPPTRPPTRPPASIFAIGPYAHETQLVTPPVFSALATEPSTAPFTPPPESVQVTTPSSPEVPFAKLLTSSLERAQRNSGINQKFGFSHYEFQSHQIYPVSPGGNLISPGSVISNSGTSSPFPDRRPILELRKAEAPKILGFEHFTTSKWGSRLGSGSLTPDGLGQSPTLGSGCMTPDGMGLDSGSWTPDGLPPSSRDDLFW

SEQ ID NO: 110121 - protein, 108 aa, Gossypium hirsutum
  Clone ID: LIB3543-014-Q1-K6-B2.pep
SRIILSSLLWVYCAALFHPRFMAAAASAATVSQVFQNHHSDNNGVEVSRQEIQAAIAKAVELRALHAALMQGNYPPNLRYPSSSSSSPVSRPFPLFSAQDYPVFTPVS

SEQ ID NO: 110122 - protein, 94 aa, Gossypium hirsutum
  Clone ID: LIB3543-014-Q1-K6-D6.pep
KERGINLPEWSYALPSPRVFHRHQGPQNLSRFGLGFGGCVGLVKGPKRPLLFVFCHEQGLKGPFSTSPTTVHGGGEVVWWRRDDGCITLAEKKR

SEQ ID NO: 110123 - protein, 63 aa, Gossypium hirsutum
  Clone ID: LIB3582-058-E4.F2B.pep
FHAKRGKKKRKRTFFGLLYPKTSNLRIWPGSKNRHLGDGNCGPGLGRRNPRIHSFWGRSEQLG

SEQ ID NO: 110124 - protein, 91 aa, Gossypium hirsutum
  unsure (1)..(91): unsure at all Xaa locations
  Clone ID: LIB3543-022-Q1-K1-A1.pep
MALYLLLESSSGCTLLHAQGLDEISPNTDAVTNSVGEIKXMGKVVQLTAFXATGNSLGGRXRCNSVPGRVMSDQLRSPMELNLPKVQAGTI

SEQ ID NO: 110125 - protein, 157 aa, Gossypium hirsutum
  Clone ID: LIB3543-022-Q1-K1-B10.pep
PNQLYLTMDDLADQFGIGTLRLTTGQTFQLHGVLKKNLKTVMSTIIKNMGSTLGACGDLNRNVLAPAAPLMTKECLFAQETADNIAALLTPQSGFYYDVWVDGERFMTSEPPEVVKARNDNSHKTNFPDSPEPIYGAQFLPRKFKIAVTVPTDNSVD

SEQ ID NO: 110126 - protein, 85 aa, Gossypium hirsutum
  unsure (1)..(85): unsure at all Xaa locations
  Clone ID: LIB3543-022-Q1-K1-B11.pep
MSPALLGVEEEGVHSNGTLQGCTGVMESVCQNSAELKERNYMGLADWAKGDSSDWXTALEERKASVNLKASELRLGHPGLQSPER

SEQ ID NO: 110127 - protein, 86 aa, Gossypium hirsutum
  unsure (1)..(86): unsure at all Xaa locations
  Clone ID: LIB3543-022-Q1-K1-B3.pep
AFRRCFGVVVLEGCLPCLGSWLCXCRWCRXPCPXGFWFSPFGFCRVSASCRRGGFPVWGFFLCVGCSFVCXGGXVLGXPWVLRXCA

SEQ ID NO: 110128 - protein, 159 aa, Gossypium hirsutum
  unsure (1)..(159): unsure at all Xaa locations
  Clone ID: LIB3543-022-Q1-K1-B7.pep
GDAVEIGSGCGGGVSSSXMLAGSGQRVAVVEKGNYFTSTDYSPFEGPSMDKLYESGGILPSLDGQLLILAGXTGRGGSAVNWSACIKSPKYVLKEWAEDCKIPLFGSNEYVSSVETDCEKIGFTHDCKEEGFHNQMLQKGSENFGLXRHKVPRNFSESH

SEQ ID NO: 110129 - protein, 87 aa, Gossypium hirsutum
  Clone ID: LIB3543-022-Q1-K1-C1.pep
NKETHLSRVAFFSPFNLVGSSSDDVDDNDEVDILKKKKKKQQDRSFSLKILMAGGRVYRSNTSADAGSNNLSVLLQSRWVPSSSEPL

SEQ ID NO: 110130 - protein, 115 aa, Gossypium hirsutum
  Clone ID: LIB3543-022-Q1-K1-C12.pep
MAFWRRINQSKLQLISNQYRRFYFQAPFTSSLHQTRIRVLEKPFCSIEDKPSYFYSNVRSFAAPVQAIKNKKAESGKEKPRLNKQITASVVRLVTEDGQHSVVSIQEALQQAKKK

SEQ ID NO: 110131 - protein, 50 aa, Gossypium hirsutum
  Clone ID: LIB3543-022-Q1-K1-D10.pep
ARYMCVIGRSNVVPAWFARVHPKTSTPVNASAFLGTAFLLLYIYFEFQLF

SEQ ID NO: 110132 - protein, 81 aa, Gossypium hirsutum
  Clone ID: LIB3543-022-Q1-K1-D3.pep
KFSQQPNIFFFLCKLLMCTIQLYKNLFPFVFFHGLMLMINRNMTILFVFQFLNTYKKGFKYNSKSCLFFRWYHQQALSRRN

SEQ ID NO: 110133 - protein, 141 aa, Gossypium hirsutum
  Clone ID: LIB3543-022-Q1-K1-E1.pep
PRVRHEVLRDRESDSNSNADRNKIMRKASFKLSWWCNGENGDQHKHDIVSFERGNITTAERSSKQISLKWESDPQTVLILTKPNSVSVRILCVQMVRWLRERKKLNVYVEPRVKVELLAESSNFSYVQTWKDDSEISHLHM

SEQ ID NO: 110134 - protein, 74 aa, Gossypium hirsutum
  Clone ID: LIB3543-022-Q1-K1-E7.pep
AVRRSTGSLVHLNNIVELILPCIRVLIGLLQSSSHRCQLRTKSFMNNIRTIPYNRKRSLNKSRLRRMQWRITHR

SEQ ID NO: 110135 - protein, 149 aa, Gossypium hirsutum
  Clone ID: LIB3543-022-Q1-K1-F5.pep
MISTSSSQKKNLQSLLASNLKKLTITPPSSNHEFDFGDVFGPLTPHHPDPTLHSPSSTSPPSAFLGDPQVIHTRSHSYVGPSPRYTVSSSLPLQIQTETEYEAEEQDDDEEEAKPKIGPEDFVILRVVGQGAFGKVFQVRKKGRNDEDG

SEQ ID NO: 110136 - protein, 158 aa, Gossypium hirsutum
  Clone ID: LIB3543-022-Q1-K1-F7.pep
KFNHISEPSHAKNMLPKRQTQHALNSRNSDESARVIPNDSDIVFLGSSRKSSSSRSSRINGKHLDVLDLYESSEIRGENSNNMENGNDEDSEDRARQIEADEMLARELQEQLYHEVDGDIAWALQLEEHTLHPTIQNIQEPDHIGSTRHYRTQSPFPT

SEQ ID NO: 110137 - protein, 133 aa, Gossypium hirsutum
  Clone ID: LIB3543-022-Q1-K1-G8.pep
MEASSLPIDSCSKEHQKIYRDWFNIADSDRDGRVTGNDATKFFAMSKLSRQELKQIWAIADSKRQGYLGLKEFIVAMQLISWAQAGHEITFDILKSSADLENIGLPAMEGVDALAANKKDFATNGVHDINGSN

SEQ ID NO: 110138 - protein, 152 aa, Gossypium hirsutum
  unsure (1)..(152): unsure at all Xaa locations
  Clone ID: LIB3543-022-Q1-K1-G9.pep
MKFHALISEFCVAKPLKNKWRNQSRRINCSKYLCFLLMFSIVLVVFLCHLFFFSIDARPSSHHHSMKKIHSLVGESSSQDSCLGXYIYIHDLPMRFNQDLLTNCQVLTRSIDKTSMCEYVQNSGXGPQIISSEASDLWNSNWFWTNQFMLEV

SEQ ID NO: 110139 - protein, 84 aa, Gossypium hirsutum
  Clone ID: LIB3543-022-Q1-K1-H1.pep
SIEIIPFFINMDIVGNRAYRFPYSRKGTKLLRRNNIMPAFTDPSSHISNYYRNTSSYEINSRVCPSQPEIQRQIWIISTLYRQE

SEQ ID NO: 110140 - protein, 52 aa, Gossypium hirsutum
  Clone ID: LIB3543-022-Q1-K1-H10.pep
KNRLYFGYKAKKEHIVFFLQTIKQSKNKRLNLIFFSSLFSVFIFIFVLLFSN

SEQ ID NO: 110141 - protein, 69 aa, Gossypium hirsutum
  Clone ID: LIB3543-022-Q1-K1-H5.pep
YFYLYVILGALNSSLEPRQGQLNSFFCQNSIILLFGLRLGLFFSLQNCTGKRLRLCVFNFGKFEFSVAC

SEQ ID NO: 110142 - protein, 179 aa, Gossypium hirsutum
  unsure (1)..(179): unsure at all Xaa locations
  Clone ID: LIB3543-053-Q1-K6-A1.pep
MFVTVNILMASTRFSLSRSVHPILKRPPCSSSPRFAPKALLKSYPCPLWSSSFSFCLQTLHHSTSPYLSSSSFSFSSCSSFSPPSMASSFTVDDSIGSNPLLQDFDFPPFDIVEAKHVRPGIRALLKKLESGLDELEKTVEPSWPKLVEPLEKXVDRLTVVWGMVNHLKAVKDSAELRA

SEQ ID NO: 110143 - protein, 136 aa, Gossypium hirsutum
  unsure (1)..(136): unsure at all Xaa locations
  Clone ID: LIB3543-053-Q1-K6-A3.pep
ASQELEAQXWAKPMTRISGDGSADSVDQTVAMAFQQCRSSNYVRIQANGSSLGRCGPNVDTDPSPSNVKLLMEIGEEMLKQKNVESILXGGNKDYVIESNMEKLDWFAGELVLEHQRRSCRIAPTVAFKQPSPKIN

SEQ ID NO: 110144 - protein, 176 aa, Gossypium hirsutum
  Clone ID: LIB3543-053-Q1-K6-A5.pep
MKQKNEQIHTTRLLTYLLIGLIGVLGLVCLYYGSSVAPGSRRYDDTDSRLDGSDPVFGGFSRNRDLVDLLDEQGYYLEVPKSIPICDMKYSELIPCLDRNLIYQLKLKPNLTVMEHYERHCPPPERRYNCLIPPPKGYKIPIRWPASRDEVWKANIPHTHLAEEKSDQHWMVVDGE

SEQ ID NO: 110145 - protein, 174 aa, Gossypium hirsutum
  unsure (1)..(174): unsure at all Xaa locations
  Clone ID: LIB3543-053-Q1-K6-A6.pep
PRVRXGDDTLPTTTATANLKKESSDSCLFGRGRYKFWAFAAILLLAFWSMFTGTVTLRWSAGNLNRLSDDIGSPIHDDLDVLEMEEREKVVKHMWDVYTNSRRIRLPRFWQEAFEAAYEELTSDVPGVREAAVTEIAKMSVQYVDLDPPPIQSTSVRELSKGLKGRSKVTSRGQ

SEQ ID NO: 110146 - protein, 121 aa, Gossypium hirsutum
  Clone ID: LIB3543-053-Q1-K6-A7.pep
GCGLVPTRIFYYKVNFDATFDASWAKSVSGVVTRNASGKVLGFKTKIHREVASLFAAEALAYLQVVIVGKQMGFKSVIIEGDSATMIKKRNSEKTDRLVIGGIIRNIKQKKHFSTQSFSND

SEQ ID NO: 110147 - protein, 84 aa, Gossypium hirsutum
  Clone ID: LIB3543-053-Q1-K6-B1.pep
CWVTAIGFPHPPFFFYLRAIFIFFFFFFYFIFFFFCILLFFFFFFFFFFFFFFFFFFFFFFFFFLKRKQADIFLAHNHNCTGRW

SEQ ID NO: 110148 - protein, 211 aa, Gossypium hirsutum
  unsure (1)..(211): unsure at all Xaa locations
  Clone ID: LIB3543-053-Q1-K6-B2.pep
FTTNSLFRFGRFLENAKLSDNYFFANCEEMLKVAAVIDELPLSLQDKYLFCLSPVDMNDEISSQGLTQFXENYAKKGLVRLKEIFSPGSLQVPKTHSALKELESIHKVLELYVWLSFRLDESFPDHELASSQKAICSMLIEEFLERLGFQNPTSRKLNSLMAKKEKTIPLIKCKLLLPCIYPLTPSPCSFPPHIPFCLSNGFVCQIRTRDL

SEQ ID NO: 110149 - protein, 85 aa, Gossypium hirsutum
  Clone ID: LIB3543-053-Q1-K6-B7.pep
QRPPSVRPRVRGRVGKNEKKLKSSLPPPLSALILAMGPVTRQPRLPPDRRRQPPHRGQKSKNRPLFFKRVVGGRAVRVVEARGDG

SEQ ID NO: 110150 - protein, 201 aa, Gossypium hirsutum
  Clone ID: LIB3543-053-Q1-K6-C1.pep
MGKYIRKAKTAGEVAVMELSQASLGVRTRAKTLALQRLQKSSTSSPPTVVSAPATGDGSFLQLRSRRLEKPPLVVHHHVSKRHKQQQQGSKKDSCVQNPNPNSYSRVRPCGGSNSEKKKGEDIVQEDNGNDNIINYSNLNNNHNESNDFGGVEASFGENILDMEARERGTRESTPCSLIRDSESIRTPGSATRPTNSADTN

SEQ ID NO: 110151 - protein, 130 aa, Gossypium hirsutum
  Clone ID: LIB3543-053-Q1-K6-C4.pep
MSYSREGRSVSPGRRRQPRSGRSRSRSRSRESQDASNPGNNLYVTGLSTRVTAVDLEKYFSNEGKVLECHLVTDPHTKESRGFAFVTMETVEGAERCIKYLNRSVLEGRLITVEKVLIYTKDRVVSLYRS

SEQ ID NO: 110152 - protein, 96 aa, Gossypium hirsutum
  Clone ID: LIB3543-053-Q1-K6-D1.pep
LVKQIKPVRDAMTEALQLWKKIAGKGDAEAADYQKASSRDGDNTQTTESSQKNGLKHPNAGGKKNDPSAKDSSNNLSPTSDSVSKGKGGSIPEKQL

SEQ ID NO: 110153 - protein, 65 aa, Gossypium hirsutum
  unsure (1)..(65): unsure at all Xaa locations
  Clone ID: LIB3543-053-Q1-K6-D3.pep
DSSQVALRLIHHLCHQGFHQYFDDGVCDMLTVTRGEENELHLPAVYCSTATSSSSFRXGPPFRSM

SEQ ID NO: 110154 - protein, 109 aa, Gossypium hirsutum
  Clone ID: LIB3543-053-Q1-K6-E6.pep
MFKKIIKGGQRKHSKSDSTDASLYGSGPNSNAVAAPSRNSDVPMAPPPMATVEPLPLFRDVPVSDRQNLFMRKLQICCFQFDFSDTLKSAREKEIKRQTLLELVDIIQS

SEQ ID NO: 110155 - protein, 178 aa, Gossypium hirsutum
  Clone ID: LIB3543-053-Q1-K6-E8.pep
MAENERVRENQTPLNTSKNYKVQEDISRITIQFDAAFDNRNLKSVTGLVVWGLMGELLVLKSTLHNNIPSPFAAEAFACLEGIKLGITIGIQSVIIMGDSRTVIKKFQMSSTDKLGIGAIIKDIQNKNSYFQEIIFKHIHRSGNWQAYRFSKHTLQSREISYLVGEEVNRHPLVSEGR

SEQ ID NO: 110156 - protein, 182 aa, Gossypium hirsutum
  unsure (1)..(182): unsure at all Xaa locations
  Clone ID: LIB3543-053-Q1-K6-F8.pep
SSQKGDQESDQRASLSEETLSKHKNAQKHAEDAAALAAAAVNRSEEIWRQLDKHKNSGLAPDVETKLTSAAVAIAAAAAVAKAAAAAANVASNAALQAKLMADEALVSSGYRNSTPNNAISDSGKRLSEATPASILKGEDAAASSNSVIVVAKEVARRRVEAASAAAKQAENXDAIVKAAEL

SEQ ID NO: 110157 - protein, 208 aa, Gossypium hirsutum
  Clone ID: LIB3543-053-Q1-K6-G1.pep
DRRSWKRSIRRKRSARRYSKNISSSSWNCNYQELSHKLKPETSKSMQSKLDESVSQNNLENCETYVTAFTPDMQNLCRKQLSQEEPIIHQTRHCKGGANVKKIKDQMEKPRVMTNNVKEGSILTYKRKRKSVVADPPKLLSGKQKCTKLHSYASAETLDGKLSEQRSSPQEAAIARYLRLDTWNCPKGKRTQRKVPIHSSGKSNMHAS

SEQ ID NO: 110158 - protein, 213 aa, Gossypium hirsutum
  Clone ID: LIB3543-053-Q1-K6-H7.pep
LSPPGFHGRAAGTANSLAPLAIRLTRVQRSYHSCIFTALNHGLQSQHPTVNRFYPNTLRFSTAVDSQKSASDESLLRVIESEIQCAEESDEYDQAEGTPSEFPFKIEDTPGLQTITLTREYDGELIKVNVHMPDLVTGEGEADDDDDDDTEKPSKSNVPLVVNVSKKGCPSLEFNCTAYPDEITIDSLSVRNPNSEDELAYEGPDFYDLDENL

SEQ ID NO: 110159 - protein, 125 aa, Gossypium hirsutum
  Clone ID: LIB3543-054-Q1-K6-A2.pep
MNKKEILKLAKGFRGRAKNCIRIARERVEKALQYSYRDRRNKKRDMRSLWIQRINAGTRQHGVNYSNFMHGLMKENIQLNRKVLSEISMHEPYSFKALVDISRNAFPGNKNVVLPTRKADISINV

SEQ ID NO: 110160 - protein, 97 aa, Gossypium hirsutum
  unsure (1)..(97): unsure at all Xaa locations
  Clone ID: LIB3543-054-Q1-K6-C3.pep
LVRPAXAVAWAVAWADAWAGKRNXGRTTLNXARQLMDSALANASEIIDHRLKIQHYKHILVGLFLIQRPXARXXXHGSYAIGRXSTGGLKAAXTNXR

SEQ ID NO: 110161 - protein, 206 aa, Gossypium hirsutum
  Clone ID: LIB3543-054-Q1-K6-D3.pep
MLKVADHIYLGGDAVAKDREILKQNGITHVLNCVGFVCPEYFKADFVYRTLWLQDSPSEDITSILYDVFDYFEHVREQSGRVFVHCCQGVSRSTSLVIAYLMWREGQSFDDAFQYVKAARGIADPNMGFACQLLQCQKRVHAFPLSPSSLLRMYRIAPHSPYDPLHLVPKMLNDPSPSVLDSRGAFIVQIPSAVYIWIGKNCESIM

SEQ ID NO: 110162 - protein, 64 aa, Gossypium hirsutum
  Clone ID: LIB3543-054-Q1-K6-E9.pep
TTVEYMLSKNARITNMYMLFCIHTPDIQSSKVGFMLMYHILQHLYLQFHAISVYLDRSEHNSSI

SEQ ID NO: 110163 - protein, 205 aa, Gossypium hirsutum
  unsure (1)..(205): unsure at all Xaa locations
  Clone ID: LIB3543-054-Q1-K6-F1.pep
LTQRLDDAQNLFDQMSIRDSITYNLLITGHGRYGNPKQALYIYKEMVSQEIQETGPTYSSLITVCANEGFYREGIQVHCRVISLGFGLNLFIGSSLVNLYHHMGLVDVAWKLFDQLPERNLAAWNLLLNGFLELGKIEELFGLHDQMKXEGVKPNGLSFCYLIRACCNARFLDEGMQLHCHVIKAGWVECNVFVANALVDFYSAC

SEQ ID NO: 110164 - protein, 105 aa, Gossypium hirsutum
  Clone ID: LIB3543-054-Q1-K6-G5.pep
WPTQALAIGWVNTPGAPNPTARGGGVSRPAARAIQETQLVADRAGSAKRPKTETARQGQVGKGAPPPATAQDFRRSPHRTNEVQVTWRYENRMTTSQAARIVRLL

SEQ ID NO: 110165 - protein, 214 aa, Gossypium hirsutum
  unsure (1)..(214): unsure at all Xaa locations
  Clone ID: LIB3543-054-Q1-K6-G7.pep
QRPTIEDLRTIQXLRDVFDAEVNKLEADRCQLGTEIAVTGDSNWPLPVNLKRLIWNAQKTFKVDFRRVSDLHPVEIVDSVDKLQERLKVVPGTDPLSVEAQKNATLFFCILLRSTLASKRVLEEYRLTKEAFEWVIGEIESRFLQSLVAAGEMIGCVAAQSIGEPATQMTLNTFHYAGVSAKNVTLGVPRLREIINVAKKIKTPSLSVYLSAEA

SEQ ID NO: 110166 - protein, 68 aa, Gossypium hirsutum
  Clone ID: LIB3543-054-Q1-K6-G8.pep
TVLPLFLVYNQVLKLFGIKKKKKKKKKKKKKKKKKKKKKKKKKKKKKKKKKKKKKKKKKKKKKKGGPL

SEQ ID NO: 110167 - protein, 168 aa, Gossypium hirsutum
  Clone ID: LIB3543-054-Q1-K6-G9.pep
MIYTAIDNFYLTDEQLKNSPSSKDGIDGATETTLRIYGCDLIQESGILLKLPQAVMATGQVLFHRFYCKKSFARFDVKIVAASSLWLASKLEESPRRARQVIIVFHRMECRRENLPIEHLDLYSKKFSDLKAELSRTERHILKEMGFVCHVEHPHKFISNYLATLETP

SEQ ID NO: 110168 - protein, 103 aa, Gossypium hirsutum
  Clone ID: LIB3543-054-Q1-K6-H8.pep
AVKLGIFMGLNKMEVVEDSKTVIKKCQSTDTNKSVIGAIIRDIQSKKDKFQENEFHFVPKAKNVYTHLIAKEALKRKGSFYLVGGIPDLVRQALENFRLKPPD

SEQ ID NO: 110169 - protein, 104 aa, Gossypium hirsutum
  unsure (1)..(104): unsure at all Xaa locations
  Clone ID: LIB3543-054-Q1-K6-H9.pep
KKEKSQQKQXKNGKQGWRMKTNPHLSVVCFLKDKYFPSPPPPQSDLGSYPYYNLEKYLVCKGFIAIGFEMQSWRWDLHFGLGGTLAYRPPSLQGAISGRVGERR

SEQ ID NO: 110170 - protein, 91 aa, Gossypium hirsutum
  Clone ID: LIB3543-055-Q1-K6-A3.pep
IVYFSSMKLRTTSSRRSWNTAFFGSWRQSSSENTNISGQQNREGFSGIRQASRVGSHSSGNIDHSSSNKRSSNEIFPEPIDIQDTERLDEN

SEQ ID NO: 110171 - protein, 89 aa, Gossypium hirsutum
  Clone ID: LIB3543-055-Q1-K6-A5.pep
MEEVCLNSEPVFDMVDEYEGEGDCSAVEHDDETGSKHSKKEPPLPTIGLEFDSFDEAYDYYNIYAKEQGFGIRVSNSWFTTKRKDRYRA

SEQ ID NO: 110172 - protein, 84 aa, Gossypium hirsutum
  Clone ID: LIB3543-055-Q1-K6-A7.pep
IISRFSLSLSRSPCFVLFFFLISSAFITNPQIISSIQISSHFFTHFFTHSLSRSILNFFPLIFLALGNQRPKHTHALHSVFCGF

SEQ ID NO: 110173 - protein, 183 aa, Gossypium hirsutum
  unsure (1)..(183): unsure at all Xaa locations
  Clone ID: LIB3543-055-Q1-K6-A8.pep
QILISLEGGGGGAKFVAALAERFVSLYGDDLSNTVIVKAPTGPEWKVELMKCDGEIWXGSGWKDFADYFSLKYGNLLIFRYEGHSRFYVFMIFDQTTLEIEYPNGIDNHEVELQIPDVEEVGSEDVVEIVNNVSRSRKTTEKTRSSPRKRTRMQGATNAKKIGVSNVKQRWKYSIYDDINLLI

SEQ ID NO: 110174 - protein, 178 aa, Gossypium hirsutum
  Clone ID: LIB3543-055-Q1-K6-B1.pep
MVKVATIVGGAAGTLALMAVIMGFFWFFKSCKSFSNRASETGSSDPSALTEWNRGVGPSSSAGPSLYGPQGAREFMLEELEQATKQFAESSLIGYGSFGLVYKGLLRDVVVAIKRHPGIPRPEFVAGVMYLSEIQHRNLVTLLGYCQEGGSQMLVYEYLPNGSMCNHLYDTGREAPTR

SEQ ID NO: 110175 - protein, 183 aa, Gossypium hirsutum
  unsure (1)..(183): unsure at all Xaa locations
  Clone ID: LIB3543-055-Q1-K6-B3.pep
YILEPNRQAYRQVLLTTPGLGXYVSGAILLAXTLYLPPTHGXKLVGVWHDQMLVPGLKGERACSPLPGCYNEPWCHXLVWIAYQDLNYLYKHXLLFAMRRTAFSMPXGPSALADHEAAWGPARIAAIPQDNGLEPIEEPKILLGXDHPIARYLDVSEIGXAEAYHYCSVNNVISVRVLLNPTM

SEQ ID NO: 110176 - protein, 130 aa, Gossypium hirsutum
  Clone ID: LIB3543-055-Q1-K6-C3.pep
DVDSGFPVVKFHFEDSLVLTVFPHEYTFQIREDIWCFGWQNSGVQSKDGKDMILLGDLVLSNKLVIYDIENQNIGWTEYNCSSSVKVKDESSGAVYSVGAHDIGSASSLRIGGILTLLSIIIALLHSSIA

SEQ ID NO: 110177 - protein, 102 aa, Gossypium hirsutum
  Clone ID: LIB3543-055-Q1-K6-C8.pep
SHQGYFYKYYYCSAYHTPIFSWNASTNTNYTSSSTFDSFHHVKLNGKAKISRKSLIFVTGIALFSHQRYGFVFAFPQVTHFFPCQEKREKWEGEDANKRRET

SEQ ID NO: 110178 - protein, 214 aa, Gossypium hirsutum
  unsure (1)..(214): unsure at all Xaa locations
  Clone ID: LIB3543-055-Q1-K6-D9.pep
PRVRGRVGAVEPGSPHIFFSCGEDGLVQHYDLRXVQPLKLFHCFSFKETNSPPLNIRLNAIIIDPRNPNYFAIGGSDEYARVYDIRRYQSDGSNVSDEPVNLFCPRHLFHSNHVHITGLAYSKASELLVSYNDELIYLFQENMGLGPSPLSLESETQLRNEEPQVYAGHRNSQTVKGVSFFGPKDEYVMSGSDCGHIFIWRKKGAKLVRVMVGD

SEQ ID NO: 110179 - protein, 213 aa, Gossypium hirsutum
  Clone ID: LIB3543-055-Q1-K6-E5.pep
YGAKGVSRVEHETATNTSLCDWMSGNETWQMTPKCDGTSQAGCKEAEDSCLPLPRTGSQQPSVNVMFESPMPISVYSRGKKRWGSSSSASSIVANFCAQEHVNSKRSADCLSVVSSDALSEAVKRKGVSRVEHQTATKISLCDWMSGNGTCKMTPKCDGTSQSGCKEAEDSCLPLPKIGSQQSSVSMRFESPIPNLIYRRKKRWGRSSSAKAV

SEQ ID NO: 110180 - protein, 71 aa, Gossypium hirsutum
  Clone ID: LIB3543-055-Q1-K6-E6.pep
LKMKHKWRVQSKVHTQSSAQLTAVMGVVISIDTFNPSIHLYALFYALSQAVYQSVNDSFTNSISSYIFRCW

SEQ ID NO: 110181 - protein, 113 aa, Gossypium hirsutum
  unsure (1)..(113): unsure at all Xaa locations
  Clone ID: LIB3543-055-Q1-K6-E7.pep
MLLTPYSVDTECWEIILTGGAGTKLSPLXRKELXPVVPSRAYYKLIDIPVSNCXNRNISKIYVXTQYNTAYLNQHLSRAYASNMXGYKNQRLVEDLGAQQYPDNPNCLQWTAY

SEQ ID NO: 110182 - protein, 166 aa, Gossypium hirsutum
  unsure (1)..(166): unsure at all Xaa locations
  Clone ID: LIB3543-055-Q1-K6-G4.pep
MFLRLVSRPLLAKFKETTGIVGLDVVPNAREVLIGLYNKTLKEIQAVPEDEGYRKAVESFTRHRLKVCQEEEDWEMIEKRLGCGQVEELIEEARDELTLVGKMIEWVPWGVPDDYGCEIIENDSPIPKHVPQHRPGPLPXEFYKTLEAFSKKDEPKITSGEPQIKE

SEQ ID NO: 110183 - protein, 65 aa, Gossypium hirsutum
  unsure (1)..(65): unsure at all Xaa locations
  Clone ID: LIB3543-055-Q1-K6-G8.pep
QGTNFYLIGEVIKSCTDPEPXQYRHMMRKGRALIXEITAITPDNAIPKLCPLWRAQLEIMSTEAS

SEQ ID NO: 110184 - protein, 156 aa, Gossypium hirsutum
  Clone ID: LIB3543-056-Q1-K6-A7.pep
TGAAFPFLGFSLAMFLFYSFVPVLLKMSGSTMLNLSLLTSDMWAVVIRIFAYHEKVDWMYFLAFVAVAVGLIIYSGGDKDDDQSRADVADQGTERSKHFDEEAGFDNLSRGNTVGSSKMGDMSRHDCMTSSGGRETIENTSMKRYARQEIMMNLLL

SEQ ID NO: 110185 - protein, 175 aa, Gossypium hirsutum
  Clone ID: LIB3543-056-Q1-K6-B2.pep
ILTIRLPSCQTRSNLKTLQSLLEYVAEGDKEGNKSSFDLEEMLAAQIFYLQQSLGINCSALPSVVSALCLLLCDHSKFSDFMHDCRTSMVTLCSKIRCPPELNPAWRWSFEHPWEDQSSQLNDLERIDELHACQSLLLIISNVLRKKSSDFQALSLQDVDNSGAFKWERSILETE

SEQ ID NO: 110186 - protein, 69 aa, Gossypium hirsutum
  Clone ID: LIB3543-056-Q1-K6-B4.pep
FPLKIISMAYCDHSMLSLAFVSLIMKHAPYPSIGMSSSYKYMSNFYMWFIQNVNLCLQLNAAPSLFHAA

SEQ ID NO: 110187 - protein, 203 aa, Gossypium hirsutum
  unsure (1)..(203): unsure at all Xaa locations
  Clone ID: LIB3543-056-Q1-K6-B5.pep
MRMGLIRTQEETGRHVRMLTHEIRSTLDRHTILKTTLVELGRTLALEECALWMPTRTGLELQLSYTLRQQNPVGYTVPIHLPVINQVFSSSHAVKISPNCPVARIRPAGKYMPGEVVAVRVPLLHLSNFQINDWPELSTKRYALMVLMLPSDSARQWHVHELELVEVVADQVAVALSHAAILEESMRARXDLLMEQNVALDLA

SEQ ID NO: 110188 - protein, 81 aa, Gossypium hirsutum
  Clone ID: LIB3543-056-Q1-K6-B8.pep
MRGYQNMLFLRQIRRFFRIAAHSKQFPKTIPLEEPALSKLKLERDPDKLFNLFKENAHNKLVVENRIAFEDTVSRLAGAGR

SEQ ID NO: 110189 - protein, 69 aa, Gossypium hirsutum
  Clone ID: LIB3543-056-Q1-K6-B9.pep
YLRKHLFLSFCNIYNIAKYIYHNMLRTEKLQIMGQKENVVDAMRNKTSTTPPPGQTLETFIFSKTAHAA

SEQ ID NO: 110190 - protein, 122 aa, Gossypium hirsutum
  Clone ID: LIB3543-056-Q1-K6-C4.pep
MRSVNDSVETVNAAASAIVSAESRVQPTTVQKKRWGSCWSFYWCFGSHKSSKRIGHAVLVPEPVVPGALISTAENASNPTGIVMPFIAPPSSPASFLQSDPPSATQSPAGLLSLTALSVNAY

SEQ ID NO: 110191 - protein, 83 aa, Gossypium hirsutum
  Clone ID: LIB3543-056-Q1-K6-C5.pep
CNSRDGYLYLSVSILRKKKKKKKKKKKKKKKKKKKKKKKKKKKKKKKKKKKKKKKKKKKKKKKKKKGGPFFKDPILKPPGWRN

SEQ ID NO: 110192 - protein, 53 aa, Gossypium hirsutum
  Clone ID: LIB3543-056-Q1-K6-E2.pep
LLLGEPILHSNTVDSQDLPISQDVCLYYSCCWMLSAVMTYQWSMDYERLQNKT

SEQ ID NO: 110193 - protein, 42 aa, Gossypium hirsutum
  Clone ID: LIB3543-056-Q1-K6-F2.pep
QHNIIAFFWMAAVGGGTGSGLGSLLLERLSVDYGKKSKLGST

SEQ ID NO: 110194 - protein, 121 aa, Gossypium hirsutum
  unsure (1)..(121): unsure at all Xaa locations
  Clone ID: LIB3543-056-Q1-K6-F8.pep
MIPTSSGISEQLPHCPAQSQLTIYYDGKVSQFDAIPAENIQKIMLIAATVAAADXTTVDMKNPPPIMPPFHLLLQGVLHIKVXATASALSQAQMTTLPRTSFSTLQAELPIARRHSLHRFL

SEQ ID NO: 110195 - protein, 84 aa, Gossypium hirsutum
  Clone ID: LIB3543-056-Q1-K6-F9.pep
IFLYIQFILILFISYSSQKPRKNTTFFHLFFIENQAIFSYTLLGFFPSVLHSKPNYLFLHLIGVFSDLHITLFSIQRVLFFIAY

SEQ ID NO: 110196 - protein, 75 aa, Gossypium hirsutum
  unsure (1)..(75): unsure at all Xaa locations
  Clone ID: LIB3543-056-Q1-K6-G9.pep
MAVSTIFFSNHSXVCLVEKIYDQTRKKEILYFPIQFHHDDLRYSCSNINIFNLVSNLCFICCCCALHLPFSYFVI

SEQ ID NO: 110197 - protein, 123 aa, Gossypium hirsutum
  Clone ID: LIB3543-056-Q1-K6-H6.pep
SSSTSLRILRNKNKKQNFERIFLLFQSFFFILIYIIVFFFIFINKNNKKETYRRGPVTALSEGRSPSQGLKVEEREASFSFLLCGKRGAPPRNLRNGLKGPALCDVGRRSRGAAAARGGMALG

SEQ ID NO: 110198 - protein, 123 aa, Gossypium hirsutum
  Clone ID: LIB3543-019-Q1-K1-A5.pep
MYLRTHNSTQPLFNGGRAGAGNGVNTPSGAKTVGRWLKDRKEKKKEETRAHNAQLHAAISVAAVASAIAAIAAATATSSSSSSTTPGKNEQSAKTDMAVASAATLVAAQCVEAAEAMGAERDH

SEQ ID NO: 110199 - protein, 138 aa, Gossypium hirsutum
  Clone ID: LIB3543-019-Q1-K1-B11.pep
FSKGFVSVHGERPSAEYAKLRKESLESEFGHIVGTHSSKRVSVVYRFGPFLAFYRAAIISFHVLKLTIWRFFFRDIKERASKFRETLIRLGPFYNKLGQALSTRPDILPPVYCQELAKLQDQIPPFTTHVAIKSIENE

SEQ ID NO: 110200 - protein, 47 aa, Gossypium hirsutum
  Clone ID: LIB3543-019-Q1-K1-B7.pep
HRIQDYNHCTSCFHCQEYISNAHLHTLWFIQVPGGQFSASLGSLAVT

SEQ ID NO: 110201 - protein, 59 aa, Gossypium hirsutum
  Clone ID: LIB3543-019-Q1-K1-C5.pep
ALIPHLLKVNIIYIRQCTAHDQMLWWSIDTLPDIWRTVLSSVSISFRSRAQSSTAYSRQ

SEQ ID NO: 110202 - protein, 178 aa, Gossypium hirsutum
  Clone ID: LIB3543-019-Q1-K1-D10.pep
PRVRFLLGFVSVTVLEAYRRRHNNAHVEAPAMFEDPESLKQVPCPDIVDPAEKYLSLIIPAYNEEYRLPGTLNETMNYLQQRAANDKSFSYEVVIVDDGSKDGTKRVAFDFVKKYGVDNVRVILLGKNHGKGEAIRKGMLHSCGELLLMLDADGATKVTDLEKLENQIHAIVRKDYHP

SEQ ID NO: 110203 - protein, 123 aa, Gossypium hirsutum
  Clone ID: LIB3543-019-Q1-K1-D11.pep
MAKSPVSLPLLYFLLLLSFNSGILLKLANGQVKKWCVAKPSTDDKALVSNINYACEQLGILGFNCSQIQPGGACYDPYTYINHASSVMNSYYQANGRQEHNCNFQGSGLITISDPSYGNCQYP

SEQ ID NO: 110204 - protein, 150 aa, Gossypium hirsutum
  Clone ID: LIB3543-019-Q1-K1-D2.pep
MAPSLNDDSPPSTIDEAFTENNLQPFVVLQKGSSRKSDRKSSGTGRTRRTDLSSASPKNSANIEDEKEDENMNLRMEAFEFVWSKIESTIKDVLRDINMNVFSEIQTWVHQSFDTIRSLGTPEFPEATQSFPIITDANSKRLFTGLVLTK

SEQ ID NO: 110205 - protein, 177 aa, Gossypium hirsutum
  unsure (1)..(177): unsure at all Xaa locations
  Clone ID: LIB3543-019-Q1-K1-D7.pep
QIVRKRGGVYETMLPKEEDFSSALYTFDIGQNDLTSGYFLNMSVDEVKAYVPDVLNQFLTIIKDIYDVGGRYFWIHNTGPVGCLPYVMERIPVLAGQIDRYGCASPFNEVAQFFNHGLKKTVQQLRXDLPHAAITYVDVYSVKYSLISQGRNHGFNQPLRTCCGHGGKYNYNKNLXC

SEQ ID NO: 110206 - protein, 115 aa, Gossypium hirsutum
  unsure (1)..(115): unsure at all Xaa locations
  Clone ID: LIB3543-019-Q1-K1-E10.pep
VKPAANIANTASSQVLDDCALKQHLIDGTIAGCALNGAERPQWMEAWVKERPNVLILPRSADSSEEAWMEITEKAISMXQSFVFDGVITTDAISDEDDEEREIVHEKGQSSIQDI

SEQ ID NO: 110207 - protein, 67 aa, Gossypium hirsutum
  Clone ID: LIB3543-019-Q1-K1-E9.pep
STARVKGIAINKIAQPKDGDGVIATAILGIMPLNEMIYDIVVYLGYAHIKHADISAYLGVDKAEYDL

SEQ ID NO: 110208 - protein, 127 aa, Gossypium hirsutum
  Clone ID: LIB3543-019-Q1-K1-F2.pep
MKRFIRRLSRVADASSHYCLLRSDSTARHRTTSTRRPEPFRVAVSLLKKQARRSVPEGHVPIYVGEDMELFVVNAELLNHPVFTALLNKSAQEYGYEQKGVLHIPCHVLVFERVMEALRLGVDSRDL

SEQ ID NO: 110209 - protein, 61 aa, Gossypium hirsutum
  unsure (1)..(61): unsure at all Xaa locations
  Clone ID: LIB3543-019-Q1-K1-H10.pep
SPVPQSPSQVQCRAXSRPDRSAYPLSYALSRARDRARIQGQIPRECARESVLKRVLSKHLS

SEQ ID NO: 110210 - protein, 170 aa, Gossypium hirsutum
  Clone ID: LIB3543-019-Q1-K1-H9.pep
MLSLIQQQLGGQPLNIVSGAADEILAVLKNEGIKNPDKKEEKVDEMKEEDEEEQEEKAEEESKEEEDEEEHEEKDGDDEEKDGDDEEEQEEKAEESEEEKGSKKHGKGKKTEEKVKGKTKKLEEKKEPEQRTPLTDRPVRERKSVERLVASIEKDSSREFQIEKGKGTPL

SEQ ID NO: 110211 - protein, 143 aa, Gossypium hirsutum
  unsure (1)..(143): unsure at all Xaa locations
  Clone ID: LIB3543-020-Q1-K1-A10.pep
LLVRYYYXXKSNVARKNLSPNHVSSVQASNKQMFMSDSGGTSEYDDDLRKDTSSPDSYGQTYEPLEGRGSNASAPNPAASLSDDAIKAASSIAVNLQQLSLGKEERAVTPKEDNRGVVLSDYLQAFSADCSHLSFCTYKSGKS

SEQ ID NO: 110212 - protein, 152 aa, Gossypium hirsutum
  Clone ID: LIB3543-020-Q1-K1-A3.pep
MSCFGCCEEDNIRKTTDNGGQHMVKISAGSDGVYYSSETAAKSAQTLKVQPIEVPDIPVDELKEVTDNFGANSLIGEGSYGRVYYGALKSRQAAAIKKLDASKQPDDEFLAQVSLASRLQHENFVQLLGYCVDGSSRILAYEFASNGSLHDI

SEQ ID NO: 110213 - protein, 72 aa, Gossypium hirsutum
  Clone ID: LIB3543-020-Q1-K1-A5.pep
MDPIQKVFNQFDKNKDGKISVSELDEVLKALGCSSPEEEIKRVMEELDIDKDGFINLSEFINLCSSSFDTQR

SEQ ID NO: 110214 - protein, 182 aa, Gossypium hirsutum
  unsure (1)..(182): unsure at all Xaa locations
  Clone ID: LIB3543-020-Q1-K1-B5.pep
ELVNVPLPTSSPPSKIPSRPRKIRKLXPDLSFDPNASQQATTSSSTSLTEQRKTVGRTSKTKLSQHRALAVVAPRIISRSLSCEGEVENAIHHLRDADPLLASLIDLHPPPTFDTFHAPFLALTRSILYQQLAFKAGTSIYTRFISLCGGENGVVPETVLSLTSQQLRQIGVSGRKASYLHD

SEQ ID NO: 110215 - protein, 181 aa, Gossypium hirsutum
  Clone ID: LIB3543-020-Q1-K1-C10.pep
PTRPPTRPPTRPQVQKKRIFSRSFTSDILIDENQDNGPELPIFNFGVVAAATKNFYEGNKLGQGGFGAVYKGELPGGKEIAVKRLSGSSGQGLEEFKTEIILIARLQHRNLVRLLGCSIQGEEKLLIYEYMPNKSLDNLLFDATKKAELGWRSRLDIIEGIARGLLYLHRDSRLRIIHRDL

SEQ ID NO: 110216 - protein, 139 aa, Gossypium hirsutum
  Clone ID: LIB3543-020-Q1-K1-C11.pep
MEMKMIYCFRGTMEEVEEANKAAIESSHRVLSILSQPQDEVSCRHLMAETGEAVFRFKRVVSLLNSGLGHARVRKLRKLQAPFPQSTLLDTPRCNPSASDYPSKNLHLGCHESSVQELTSHARKSPYLGNPSLELSSNG

SEQ ID NO: 110217 - protein, 160 aa, Gossypium hirsutum
  unsure (1)..(160): unsure at all Xaa locations
  Clone ID: LIB3543-020-Q1-K1-C4.pep
MASIKFDAFEXXFRKPQNPIQPINLLSLTQSFLPTTSSNSPNFASISSSGFFSRKPKKPGLDSDKPGPYKQMVDQFFWECENLPDYRHTPEVENFLNEDPFFENKENPTEDELKENEKWWQDFRGSPVVQFLARAEEIADEINRIELKENEEPFRKEDKK

SEQ ID NO: 110218 - protein, 70 aa, Gossypium hirsutum
  Clone ID: LIB3543-020-Q1-K1-C6.pep
GALSLVSLANFWKGKILVLIQPLRGYWEKGLHTKTILGKKKRKIGRKPGENGTGFGLFYSKYSWKGGHRV

SEQ ID NO: 110219 - protein, 142 aa, Gossypium hirsutum
  unsure (1)..(142): unsure at all Xaa locations
  Clone ID: LIB3543-020-Q1-K1-D3.pep
RTRGRTRGLTLLFCPGFFRSASCRRDSIVRRARQIFYSRVNPTVEVDVETSNDIMATAALPIAASTGFYEALELRDGSSDYLEXGVSKAVANDNTIISPALIVKDPTYQTAIDNYMCQQLDVTQNEEGWCIQNLRCKCHILP

SEQ ID NO: 110220 - protein, 121 aa, Gossypium hirsutum
  Clone ID: LIB3543-020-Q1-K1-D7.pep
MSNPSSPSPEQGIPSNTSPPPPSETLLSLPAPPTSRSTPSATATVTPNPRRLPPPCWSHDETVALIDAYRDKWYTLRRGNLKASHWQEVADAVTRRCPMATPPKTAVQCRHKMEKLRKRYR

SEQ ID NO: 110221 - protein, 158 aa, Gossypium hirsutum
  unsure (1)..(158): unsure at all Xaa locations
  Clone ID: LIB3543-020-Q1-K1-F1.pep
PRVRESVATELDVKVCDICGDAGPXXLLAICSKCADGAEHTYCMREMLQKVPEGDWLCEECKLAEEIESQKQGLDSEXKRQKKLSSTTQNLGKRHAENLEDASASKRQAVEQKMGSPKSLSPSKASALSREGSFKNMDKGKVRPSPQLSLGSHSGNDL

SEQ ID NO: 110222 - protein, 181 aa, Gossypium hirsutum
  unsure (1)..(181): unsure at all Xaa locations
  Clone ID: LIB3543-020-Q1-K1-F10.pep
PTEDMKMVAICALQNFVMRSRTNXXXVAEAGGILVIQELLLSPNADVAVQAALLIKFLFSNHTLQEYVSNELIRSLTAALERDLWSAATINEEVLRTLNVIFANFPMLHISEAATLCIPHLIGALKSGSEGAQEAVLDTLCLLKHSWSTMPIEIAKSQSMIAAEAIPILQMLMKTCPPSFH

SEQ ID NO: 110223 - protein, 42 aa, Gossypium hirsutum
  Clone ID: LIB3543-020-Q1-K1-F5.pep
SVYPVKHINHVCSYIQIVNVLVVCPILQGWSVIYLGHSFEEK

SEQ ID NO: 110224 - protein, 65 aa, Gossypium hirsutum
  unsure (1)..(65): unsure at all Xaa locations
  Clone ID: LIB3543-020-Q1-K1-G12.pep
PTLGQYPWAGRAGETRVSDAVTGLAXSPLNLTSTEFPIVLMDTCGNKTESTKIKHQDHCVLRCRQ

SEQ ID NO: 110225 - protein, 89 aa, Gossypium hirsutum
  Clone ID: LIB3543-020-Q1-K1-G3.pep
PKTKPIRINCDPSKPSPGWSWLERWMSTSSSEKTSMAELPNEQPRDSPLDATVPSKAISESNDVNKILVSSESEENLITYVAGDSKSKG

SEQ ID NO: 110226 - protein, 108 aa, Gossypium hirsutum
  unsure (1)..(108): unsure at all Xaa locations
  Clone ID: LIB3543-020-Q1-K1-G6.pep
YIAEGSSPIPRLRYNSHNWIGEDPSVNRERNRGAIIEQEALIFISTQIRITIPLHIFLEKKRGKKRQSRRRGVVLQPMEKKREIAEWXXDGXLGXQCEKKGEGGENNE

SEQ ID NO: 110227 - protein, 62 aa, Gossypium hirsutum
  Clone ID: LIB3543-020-Q1-K1-G8.pep
CLQILKEEGWIGLTSGLGPRVVHSACFSALGYFAFETARLAILHQYLKHKEKELSKISVAPA

SEQ ID NO: 110228 - protein, 66 aa, Gossypium hirsutum
  unsure (1)..(66): unsure at all Xaa locations
  Clone ID: LIB3543-020-Q1-K1-G9.pep
VTIFSCFLWGKIYGQCTSPLISIILQCSLNWCLPSNTHVSPTLNRVMNQMNYINTFVDRXXSDRTY

SEQ ID NO: 110229 - protein, 148 aa, Gossypium hirsutum
  unsure (1)..(148): unsure at all Xaa locations
  Clone ID: LIB3543-020-Q1-K1-H5.pep
MVSDQEIARGVENLLRQSDPSVATTLNGVVQQLEAKLGLDLSHKAGFIRGQINLLLRPPQTQAQPPPKDHFNLQHHPQFTSHHHHSQFPPHFALQHHSQFPSHELNFRQPHPPLTAQPPPQLQPQLQQHHPHHXQHHHHQQQPQQLQQ

SEQ ID NO: 110230 - protein, 157 aa, Gossypium hirsutum
  Clone ID: LIB3543-021-Q1-K1-A2.pep
MNNPKLKGYGFNPSEQILIGYLRDRTLFGRDYLVQDIIDLSHDICSYDPWDLPGCDSVTPNDSERFFIYPKTYKYANSKSKVIGTPTGQVPNSDQRQPMINRATKNGNWKVSGVRVNINSRDETKQVIGIKTRLYFKHNSCPNKTSCVLHQFRTCWY

SEQ ID NO: 110231 - protein, 150 aa, Gossypium hirsutum
  Clone ID: LIB3543-021-Q1-K1-A3.pep
GLHCLLVKAETETTAGLLARPVLTSYYNSDHFKTRPYDPFNVYTSPNEAILCVDSFQSMYAQMLCGLIMRNEVLRVGAVFASGLLRAIHLLQNNWKQLAHDIATGTLNPKITDAPVRECMRKILKPNPELAQFVTMECYEENWECIIKRI

SEQ ID NO: 110232 - protein, 92 aa, Gossypium hirsutum
  unsure (1)..(92): unsure at all Xaa locations
  Clone ID: LIB3543-021-Q1-K1-B11.pep
HASVLIFLLPIEFTMDELRKHSTIFFSLHGRGGGGGFRGRGDGGRGRGXIISPWRYGVNRILILRLIDTKMNLDIKILQVQVLLYVVWMQIT

SEQ ID NO: 110233 - protein, 114 aa, Gossypium hirsutum
  unsure (1)..(114): unsure at all Xaa locations
  Clone ID: LIB3543-021-Q1-K1-B4.pep
MDLALRRSSFAVIRAQQPGTISPKEEDEEDALKAKEWEVGMFQNQVSASQGIRILRPPPTSPPLHYVGPFXIRLQNDGNTPRNILEEIVWHKDTEVSQMKERKPLATLKKFIEN

SEQ ID NO: 110234 - protein, 55 aa, Gossypium hirsutum
  unsure (1)..(55): unsure at all Xaa locations
  Clone ID: LIB3543-021-Q1-K1-B6.pep
MPEQIXRIQDCLLTARRKDATXVKMRKNRDVLKFKVRCSKYLYTLXVSDAEKADK

SEQ ID NO: 110235 - protein, 172 aa, Gossypium hirsutum
  unsure (1)..(172): unsure at all Xaa locations
  Clone ID: LIB3543-021-Q1-K1-C1.pep
TRPPTRPLKGRGSVMLFPLPFQGQINPMLQLANILHERGFSISIIHTRFNSPNPLNYPLFRFYPIPDGLSENHVISSDPNRIVAFVKFLNSNCQTPFRVCLAKLISTSLEDEDPTACLVTDALWYSTQXVADDLKLPRIVLRTSNVSSFIVLSSMSLLFEKGYLSLQDSVVE

SEQ ID NO: 110236 - protein, 44 aa, Gossypium hirsutum
  Clone ID: LIB3543-021-Q1-K1-C4.pep
VTDLDTLKHRFLNKDPSLPVRLNVQVLVGSGLSVLRSISVSFNQ

SEQ ID NO: 110237 - protein, 175 aa, Gossypium hirsutum
  unsure (1)..(175): unsure at all Xaa locations
  Clone ID: LIB3543-021-Q1-K1-C5.pep
KDASNGNTRVFINGREITKTELRVLKLAKVQCPRDTHFWVYEDGSYEEEGQNNIKGKIWEKAFTRFCCSLFSLPVPATNPHGPQEDPTTFSGRSVPEYLGHGRVQKLLLYELEGSGTSTIFKQAKVLYGNGFSPEEMGNIKHMIQSNMYKYLSVLLEGRERFEEEAXSELRTNNL

SEQ ID NO: 110238 - protein, 86 aa, Gossypium hirsutum
  Clone ID: LIB3543-021-Q1-K1-C8.pep
VTLLVDAGKPINTLLFVHDGSKRYLPDEKVQSVHGITLTADGMAAAYDDAEDDAETFLTVAENASNVNLQELKNAYPPSRQTDMSR

SEQ ID NO: 110239 - protein, 111 aa, Gossypium hirsutum
  Clone ID: LIB3543-021-Q1-K1-D10.pep
LFMFVVPHYRIRCVRRCHIASRYLQRSPIAAIAVRSCARDTILTSRSFGISFQSVITAVSILTRTSLFPAAAINSLSKLEFIFCLPTFALLVIYLFCLPPRYTNIYFYVME

SEQ ID NO: 110240 - protein, 84 aa, Gossypium hirsutum
  Clone ID: LIB3543-021-Q1-K1-D4.pep
FRHTLPLVLDRGAAPFFFFSLSFYPWGSLLGGGFFCRSSRFLFLECQMNHAAAAVFFFFFKKGGFSPEGLKEPMQPLLSPPPLA

SEQ ID NO: 110241 - protein, 169 aa, Gossypium hirsutum
  Clone ID: LIB3543-021-Q1-K1-D7.pep
ILSIDSGGMKGILCGKALAYLEKAWKSKSGNPNARIADYFDVVAGSSVSGIFTAMLCATRDNNQPIFTAEETWRVLADNGKRIYRSGAGINGGILKKILKNGSTGSSSNGMEKVMNEAFTAGRTSMTLTDTLKPGLISCYDLSSTAPFLLSRADATETASIDLPLWEDC

SEQ ID NO: 110242 - protein, 167 aa, Gossypium hirsutum
  Clone ID: LIB3543-021-Q1-K1-E11.pep
MASTTMAAGFGSLAVDENRGSSTHQSSTKICRVCGDKIGQKENGQPFVACHVCAFPVCRPCYEYERSEGNQCCPQCNTRYKRHKGSPRISGDEEDDSDQDDFDDEFQIKNRKDDSHPQHENEEYNNNNHQWHPNGQAFSVAGSTAGKDLEGDKEIYGSEEWKERVEK

SEQ ID NO: 110243 - protein, 45 aa, Gossypium hirsutum
  Clone ID: LIB3543-021-Q1-K1-E2.pep
SLHVASKLRIIVNNRRYIEPISCSLMKIVITMHHFLEHMLGESSV

SEQ ID NO: 110244 - protein, 72 aa, Gossypium hirsutum
  Clone ID: LIB3543-021-Q1-K1-F10.pep
MGYVLRVRLASFFTGAATASFLGLYILYKDYKVAHESIAQRVKRLHEPLDRRISALESLKQGETSQHVEATE

SEQ ID NO: 110245 - protein, 79 aa, Gossypium hirsutum
  Clone ID: LIB3543-021-Q1-K1-F3.pep
MGQGLSCVASQENELFTAVQVGDFETVETLLEREPNLSHHTTVYDRHSALHIAAANGQIEILAMFLEKSVNPDVVNRHK

SEQ ID NO: 110246 - protein, 69 aa, Gossypium hirsutum
  unsure (1)..(69): unsure at all Xaa locations
  Clone ID: LIB3543-021-Q1-K1-F6.pep
MGETENHHHHPPXPXAAAPPAAPPAAPPSLALSRGPTWTPAEQLHQLQYCIHSNPSWPQALLLAFQHYI

SEQ ID NO: 110247 - protein, 100 aa, Gossypium hirsutum
  Clone ID: LIB3543-021-Q1-K1-G1.pep
CAALKHQGNHDGRVDAAGSIALLYSVIATHVIYIVNALSAYSKFRMCPYSPIRPYFNSSHLRQALLLCISILRSSMSGRPTIIVLMIANPCTHISLTHAL

SEQ ID NO: 110248 - protein, 60 aa, Gossypium hirsutum
  Clone ID: LIB3543-021-Q1-K1-G7.pep
PTRTGLDNTKAANETGHKFRETILALGGGKAPSEVCAEFRGREPSPEALLKHNGLIPGAA

SEQ ID NO: 110249 - protein, 64 aa, Gossypium hirsutum
  Clone ID: LIB3543-021-Q1-K1-H1.pep
SLSTGQPPSAYRLATYLRLGRVNQYGKHDTGATLVTAFMTLAHCVSRPVRVTYCPEQAVYRIVH

SEQ ID NO: 110250 - protein, 111 aa, Gossypium hirsutum
  Clone ID: LIB3543-021-Q1-K1-H9.pep
MAKKKSWFNLVKRFFLFETLINAQKDNRRKWMFGRFRTKRLASIKAPSPPRDSIKYETEEDQKKHALTVAIAAVAAAEAAVAAAQVAAEVVRLTGADAPKAKEEQTIDVKP

SEQ ID NO: 110251 - protein, 163 aa, Gossypium hirsutum
  unsure (1)..(163): unsure at all Xaa locations
  Clone ID: LIB3543-028-Q1-K6-A1.pep
STLGWGGTHARVTCSRRNQNETFEVLVKVLLSVGPGEDXELLRREFEEFIKGLICLPIKLPGTTLYKSLKAKERLLKVVKKIVEDRKLAMEEETDEKGMANDAGYLLILDSTEEPSNDQINQSLPLDFITANIIEMMIPAEKTVPMAMTLAVKFLSACPVALQ

SEQ ID NO: 110252 - protein, 93 aa, Gossypium hirsutum
  Clone ID: LIB3543-028-Q1-K6-A10.pep
TLQQKKPLTPNTCRSRRSTNDLRVPLHLGLQGKNTRPPSRGVLAHVPRIVLALSESPASLVAGDFRAVEGLGIGLRRRAYIIVTPPPPPGFFF

SEQ ID NO: 110253 - protein, 205 aa, Gossypium hirsutum
  Clone ID: LIB3543-028-Q1-K6-A2.pep
PSVRSVAVKIISKAKMTSAISVEDVRREVKILKALSGHKNMIKFHDAFEDANNVYIVMELCEGGELLDRILSRGGRYTEGDAKNIIVQILSVVAFCHLQGVVHRDLKPENFLFTTRDEDAPMKIIDFGLSDFIRPDQRMNDIVGSAYYVAPEVLHRSYSVEADMWSIGVITYILLCGSRPFWARTESGIFRSVLRADPNFDDSPW

SEQ ID NO: 110254 - protein, 198 aa, Gossypium hirsutum
  unsure (1)..(198): unsure at all Xaa locations
  Clone ID: LIB3543-028-Q1-K6-A7.pep
TFRGGAKAGTDQATAAADRLAAMNLTGSVENHAFSDRVLIRSIAGRPDGGLXLSGQRVRAGGWLKTGREQGKXFLELNDGACLGNLQVIMDAGVAVLSKLVATGTCVVVDGILKVPPEGTKQRIELRVEKVVHIGXVDPAKYPIPKTKLTLEFLRDHLHLRSRTNSIAAIAQIRNALAFATHSFFQERXHFLYVHTPI

SEQ ID NO: 110255 - protein, 63 aa, Gossypium hirsutum
  unsure (1)..(63): unsure at all Xaa locations
  Clone ID: LIB3543-028-Q1-K6-B10.pep
NITDDPWIRAVVPTINYLMGNGSKLILSSHLXRPKGVTTKYSLKPLGPRLSELLGVAGQMAND

SEQ ID NO: 110256 - protein, 163 aa, Gossypium hirsutum
  Clone ID: LIB3543-028-Q1-K6-B4.pep
QIWPILGAADEDLISSLPDSLLQEILCFLPIEDAIKTSFLSRRWRSLWTQMPTLSFTRECYVFKHAKRAAFVNETLARFIGPKIKNFLINFKFDEFMDAFFDEWVLFATSHHVEKLSLLLDGGFLYAPFAECKPYSLPQFLYVNFSLNELILRQCVVLPTSQV

SEQ ID NO: 110257 - protein, 146 aa, Gossypium hirsutum
  Clone ID: LIB3543-028-Q1-K6-C2.pep
RVDPAFFPRPPNFPSRVISFPFHRFCHLFFSFVSFIFFMDYLCCCCYFLYGLSHSVLPSVLLVLFSFIFFIDYLCNFFSLPSVLPSVLPSLNQPTSVILKKGFYEGVFEATFLEALIIRSILGTNAVFNLIFPVFFINNFRHFFLN

SEQ ID NO: 110258 - protein, 131 aa, Gossypium hirsutum
  unsure (1)..(131): unsure at all Xaa locations
  Clone ID: LIB3543-028-Q1-K6-D4.pep
EGPKPYLPKDSLSTQCQFEHLRLKPLQLQTMVIAILGKADKVXLGVFMKHAHXVCLSSLEEVQDVAPLIPMIRKSVIMPKTAMALTIGASILGQVIGSRAERQRLKAVAEREKVAAETAIAAVVAGYNDLS

SEQ ID NO: 110259 - protein, 105 aa, Gossypium hirsutum
  Clone ID: LIB3543-028-Q1-K6-E12.pep
TPKWHAFTAVDPPRPAKQKQKRAKQQKQKEIVTNSRKIFVFGYKKSLEQTIFLHRLLRKKSKIQAKVDSNLVFDSFFIFYLCFHFFIFHFYFFNHKSILNKIKRE

SEQ ID NO: 110260 - protein, 157 aa, Gossypium hirsutum
  Clone ID: LIB3543-028-Q1-K6-F9.pep
MAFSRSLSSRATLIARRYQPSFAYIFHDDDRKTHPSTEPQSTQKPGNFGQQRSFGTGFSNSSSGLCGVLFHDRRCSQLAFLPGTGVSFGRFMSTKVNDGAKEVELMTDVAEAFKDTAIEAVTSQVPAVNEVAVAAADCWLPVATLQYVIDAVHSFTG

SEQ ID NO: 110261 - protein, 201 aa, Gossypium hirsutum
  Clone ID: LIB3543-028-Q1-K6-G12.pep
SGSPSAVVGGGWAGASTLSNYSNLSLISSRSSPHPKTNSSEIASVNLTSQPCSKSAFSPLGGGAPSLAERRGSLSKSLKLPVMSDSIRETNDRSCFLVKQDGVRIDTSSSCESDIEIVFDSKRGVRNGGDILVQGSGLKISPGRLANVGQRDSESTFVNSCCESPRNHSPQDGLLSAVPNRMEEIIPACTGVVQPLVCRWP

SEQ ID NO: 110262 - protein, 76 aa, Gossypium hirsutum
  unsure (1)..(76): unsure at all Xaa locations
  Clone ID: LIB3543-028-Q1-K6-H1.pep
VAPILKGGDFFFHGVTWVNRVVAHLIFVSWRTSXEGWTDRPXDQLHSLYEKWDTPCGDGFTPWGVAFTPRVTVVLP

SEQ ID NO: 110263 - protein, 96 aa, Gossypium hirsutum
  unsure (1)..(96): unsure at all Xaa locations
  Clone ID: LIB3543-028-Q1-K6-H10.pep
GEKKKTIIPPXXPXFKTSIXFSHQXRTXVLFKVLSAFFFXNITXTMGGGGGFLXFXXXLXXDAEGGAAKHPPHMPHXXXEAXRAEARXQNARAEGQ

SEQ ID NO: 110264 - protein, 144 aa, Gossypium hirsutum
  Clone ID: LIB3543-029-Q1-K6-A2.pep
VWFVVMGAATNVVDNKEARLPREVKDALQSMASEWDDVVDSKALQVIPLKGAMTNEVFQIKWPTRGDNVSQKVLVRIYGEGVDVFFDREDEIRTFEFMSKHGQGPRLLRRFRNGRIEEFIRARTLSASDLRDPAISALIATRLR

SEQ ID NO: 110265 - protein, 99 aa, Gossypium hirsutum
  Clone ID: LIB3543-029-Q1-K6-A8.pep
NLKAQSKILNPTLESAQNIPQLIETLKSNSFQHHSSVHPPRAPHANQTSPRMLRLRTREHPGVPLHDGADRIPVRFVVIGARARTVRLKIGRVSERRKS

SEQ ID NO: 110266 - protein, 163 aa, Gossypium hirsutum
  Clone ID: LIB3543-029-Q1-K6-B1.pep
RSSSSEPPIDLTQNHPIPKLDSPTAVRIKIKATSLTFATYLKILGKYQEKHPLPFIPGSDYAGTVDAVGPSVTKFKVGDYVCAVSPIGSFASFIVQDQSRLFEVPKGCDLVAAAGLPVAFGTSHLALVHRANLTSSQVHRARAASLASQDTGDLRGFERQNLN

SEQ ID NO: 110267 - protein, 90 aa, Gossypium hirsutum
  Clone ID: LIB3543-029-Q1-K6-C6.pep
TKHLSGLVRSSSILIGGGEFSLLQTFQPPSRTMRYPTLPKVFLATIPDPDLKRTLSNVVSKFILILALVGGSYCLPSHRLLLVSFCPQAP

SEQ ID NO: 110268 - protein, 79 aa, Gossypium hirsutum
  unsure (1)..(79): unsure at all Xaa locations
  Clone ID: LIB3543-029-Q1-K6-D11.pep
MLSPIYIHTFYSNMKFRLYINHYNRRKVXXKKKKKKKKKKKKKKKKKKKKKKKKGKKRKKEERGKERXEEKKKKKRGGA

SEQ ID NO: 110269 - protein, 166 aa, Gossypium hirsutum
  Clone ID: LIB3543-029-Q1-K6-D9.pep
MVKLLSLCLIFRLTGSQSPPAYWNAGRAGFYGDMNGTETMMGACGYGDLIKQGYGLETTALSTALFNNGLTCGACFEIRCYDSVQWCLNDTIIVTATNFCPPNYSKPEGNWCNPPLQHFDLSQPMFRKIAVYRAGIVPVLYRRVPCVKSGGVKFKINGNQYWILIL

SEQ ID NO: 110270 - protein, 182 aa, Gossypium hirsutum
  unsure (1)..(182): unsure at all Xaa locations
  Clone ID: LIB3543-029-Q1-K6-E12.pep
FVQRPAFGGGRGGEKNSRHWDKVRKXVMYTWNCSALDVDNHSKTEPGCGCFQLPSGPGGGGVLCGGSSRKRKQLRETELSFHKQVSSEKALKHNTRGSAKAETKHQAFALQHQAFALDDDIIPPPPTLELKSGSEIELSDIQKNFQRLYDYNVMLREKFVATQSLLHDLAAKSPSPTTERQT

SEQ ID NO: 110271 - protein, 80 aa, Gossypium hirsutum
  Clone ID: LIB3543-029-Q1-K6-E4.pep
RFSKLDLYRKFSNALAVAVIASVAWITFEVYFKATDPFNERWQSAWIITAFWDILSFALLCVICYLWAPSQSSQRCVLLF

SEQ ID NO: 110272 - protein, 94 aa, Gossypium hirsutum
  unsure (1)..(94): unsure at all Xaa locations
  Clone ID: LIB3543-029-Q1-K6-E9.pep
NFPLPNIHVFLVVWLVYIDTVCQNLSKKTKKLRFLSLRSFLGNWPPSVSXKSHLSSIPSPPCSTNFSFDPLIHPKKENPVRQLVIIYIFLSTFI

SEQ ID NO: 110273 - protein, 40 aa, Gossypium hirsutum
  Clone ID: LIB3543-029-Q1-K6-F4.pep
TQSHESRNHYKFRMINLQFDIHIVHCYCPHDNISTLWLNN

SEQ ID NO: 110274 - protein, 122 aa, Gossypium hirsutum
  unsure (1)..(122): unsure at all Xaa locations
  Clone ID: LIB3543-029-Q1-K6-H3.pep
TXKWVQKXHHPXKXKSPXXIXXAFNXKXXKETXNQKENXQQXSGVEHGPTGRNXGHXXRKERTETRAPSPNLGAVAXRVKKCPVNKKRPXXSPSVMLXLEPFXXEAEXGSKKIXLWGDSKFV

SEQ ID NO: 110275 - protein, 118 aa, Gossypium hirsutum
  Clone ID: LIB3543-029-Q1-K6-H5.pep
GGSKQCFRYAFGGKPLLATAEVDNAGKCGLCGASRHFELQLMPPLIYGGGEEFYGCHKGSLENWNWLTLVVYTCSKSCSNSFDEEKSIHGHGQWFVVEETVLMQFDKPLNECLQCYFS

SEQ ID NO: 110276 - protein, 83 aa, Gossypium hirsutum
  Clone ID: LIB3543-030-Q1-K6-A1.pep
DPNTGPIGPMSKTRAKAETLAALARAATATGQQLHASVRPSLLVPRPCPILCTFAYEPQETSSLSLKSKSRMGFRGLNRKMPR

SEQ ID NO: 110277 - protein, 61 aa, Gossypium hirsutum
  Clone ID: LIB3543-030-Q1-K6-A4.pep
FPKLKRTDSEITVINYITCFFLAVKYTGILGITILNCSGAFSYQTNTAINGDQLLSMNKKK

SEQ ID NO: 110278 - protein, 182 aa, Gossypium hirsutum
  unsure (1)..(182): unsure at all Xaa locations
  Clone ID: LIB3543-030-Q1-K6-A5.pep
TCRSPKPSTSYLQRLNCEVLVINEPVVNAMFFTQMGRLCVFTPLLKRFPSDSHIATILQHEVSHALARLIADXITKNLWFGILQLILYQFIMPDLVNTMSTLFFRLPFSRXMELESDYIGLLLLSSAGYDPRTAPKLYEXKLXMVAKDSTLQDYLSTLPSGKKRAQLLAQAQVMXEEALMIY

SEQ ID NO: 110279 - protein, 47 aa, Gossypium hirsutum
  Clone ID: LIB3543-030-Q1-K6-A7.pep
VTLATIRCSLSEHKGSLTFIIYHVSRAIFCLLKRPLSGPRDPFLVIP

SEQ ID NO: 110280 - protein, 180 aa, Gossypium hirsutum
  unsure (1)..(180): unsure at all Xaa locations
  Clone ID: LIB3543-030-Q1-K6-B1.pep
AFPYGRKKTLIYEFIAQRXRSEKFIYGQNISEDNRQHLTVQVLYQIAIGISRGLEYLHLGCNIRILHFDIKPHNILLDDQFCPKISDFGLAKLCGRTDGMVSMLEARGTIGYIAPEVFCRNIGFVSHKSDVYSYGMMILEMGGGRKNLDVGVHHTSEIYFPQWIYEHIEQAILSRNCLVL

SEQ ID NO: 110281 - protein, 55 aa, Gossypium hirsutum
  unsure (1)..(55): unsure at all Xaa locations
  Clone ID: LIB3543-030-Q1-K6-B12.pep
LSTVKIXXNVGGGEEALHFFQACMCSILDRTCSQIFTLSLENFLVLENILILIIS

SEQ ID NO: 110282 - protein, 148 aa, Gossypium hirsutum
  Clone ID: LIB3543-030-Q1-K6-B4.pep
MTVIDLITRVDAICKKYDKYDIDKQKAVNVAGDDAFARLYGVVDSEIDAALQKSEAAATEKNRATAVAMNAEIRRTKARLLEELPKLQRLALKKVKGISKEELEARNDLVYSLKDRIDSIPDGSSTATKQSTGGWATSTSFTGIKFDS

SEQ ID NO: 110283 - protein, 197 aa, Gossypium hirsutum
  unsure (1)..(197): unsure at all Xaa locations
  Clone ID: LIB3543-030-Q1-K6-C1.pep
SSVRXMLVASDQIGCVIGKGGQVIQSIRSETQAQIRVLSNEHLPPCALTSDELLQIIGEPSVVRKALYQVASRLHDNPSRSQHLLLSSLSNMNPSGGMYMNASLIGSYGNYSSRRDDGSAREFSLRLVCPVGNIGGVIGKGGGIIKQIRQESGASIKVDSSAAEGDDCIIFISTKEFIEDPSPTINAALRLQSRCSE

SEQ ID NO: 110284 - protein, 75 aa, Gossypium hirsutum
  unsure (1)..(75): unsure at all Xaa locations
  Clone ID: LIB3543-030-Q1-K6-C4.pep
KPISLLLIXHYYFELQQRENKKPREQDSFLRLSFKFQLLVLSEEKKTTKFELEVLDQRKTPLFPAPTPEIHSLNX

SEQ ID NO: 110285 - protein, 190 aa, Gossypium hirsutum
  unsure (1)..(190): unsure at all Xaa locations
  Clone ID: LIB3543-030-Q1-K6-C8.pep
ETGGQIDADTAEVGEXXEIDFKEDAKFAQHLKKGEAVSEFAMSKSMAEQRQYLPIYSVRDELLQVIRENQVVVVVGETGSGKTTQLTQYLHEDGYTINGVVGCTQPRRVAAMSVAKRVSEEMETELGDKVGYAIRFEDVTGPNTIIKYMTDGVLLRETLKDADLDKYRVIVMDEAHERSLNTDVLFGILK

SEQ ID NO: 110286 - protein, 183 aa, Gossypium hirsutum
  unsure (1)..(183): unsure at all Xaa locations
  Clone ID: LIB3543-030-Q1-K6-D11.pep
SSPRXMGSLEERWNWHQLLSRGDFLSLRHVRDQLPQDLVDAYDKFQEQVDKHLAPTKARMALEEEEKRVREEEEQKYSERTVDDLTKLCMKVSAPIELVRKAVRMVGFTNNMGRPRPISVLFALEDADIVKWYAGVGRRWLDFFCCCHNFRMVKTIVSYHLFSCILTLAHKHESTKLEAIKHY

SEQ ID NO: 110287 - protein, 49 aa, Gossypium hirsutum
  Clone ID: LIB3543-030-Q1-K6-D3.pep
LKRPAPFFFFFFFFFFFFFFFFFFFFFFFFFFLGVVFSFLLQSERGINI

SEQ ID NO: 110288 - protein, 201 aa, Gossypium hirsutum
  Clone ID: LIB3543-030-Q1-K6-D8.pep
PRVRPACGGAWADAWADSDRRQLSSDGSLALGWHKDEDASANRSSVSEFGDDNFAVGTGGQKEVVSRDGHMKLRAQVFFASIDQRNERAAGESACTALVAVIADWFQKNRDLMPIKSQLDSLIRDGSLEWRNLCENETYRERFPDKHFDLETVLQAKIRPLTVVPRKSFIGFFHPEGMDEEKFDFLHGAMSFDSIWDEINR

SEQ ID NO: 110289 - protein, 179 aa, Gossypium hirsutum
  Clone ID: LIB3543-030-Q1-K6-E9.pep
GRVGSLVPVSFNPPFLHSHSHSFSSKPSSLSPSPSNLFVCFFSSSPPPPPPPSSSSSSHNSSNFDREETRWLREEQRWLREEQRWLREEQRWLKGKESLLWEISQLKLQIQALENRNSFHGASVTETISRIGALLQVLKDKNRIAESGESARDMVFEEVKEKEVVVEEGVRVLEKKQKS

SEQ ID NO: 110290 - protein, 67 aa, Gossypium hirsutum
  Clone ID: LIB3543-030-Q1-K6-F2.pep
FPSFPDLTSSSLDGKANLGSAEECSKVTRHCQNTKKIKHKKKIPQKRKGSVREENIRSNMAFIQFPF

SEQ ID NO: 110291 - protein, 62 aa, Gossypium hirsutum
  Clone ID: LIB3543-030-Q1-K6-F4.pep
KQRDALRIRLKQSFMIKDNTSKVPTISMFQSSQQNLHSLPFPVLGKRSMFIQLVQLLKDMKK

SEQ ID NO: 110292 - protein, 54 aa, Gossypium hirsutum
  Clone ID: LIB3543-030-Q1-K6-F6.pep
HCQKQTDIHKSYYYSLLHCMILIFKIFASHAIAPLPCPRLSVLNLINVAVPTTF

SEQ ID NO: 110293 - protein, 64 aa, Gossypium hirsutum
  Clone ID: LIB3543-030-Q1-K6-F7.pep
RFSTRPFLFKRAGGCGFTHVNKTIALSVWQSLLPSSLQSSWFTPVMNMNNITLINFGEILYITQ

SEQ ID NO: 110294 - protein, 163 aa, Gossypium hirsutum
  Clone ID: LIB3543-030-Q1-K6-G9.pep
VFKGFEQNHQMDDSFMLEDVNGVASQVQSWHFMDDDFSIQEKAGISSPKRGSVSHSHLKEFQQGNHTILSSLDLEVDDDLHYKRTVSAILSTSNWLIESPSFTTCGYKSSFISWKKEGMENFHRPRLHQNIFKKILFAVPLMHRGKCSLGKLENNIDATHVLP

SEQ ID NO: 110295 - protein, 170 aa, Gossypium hirsutum
  Clone ID: LIB3543-030-Q1-K6-H12.pep
MTTSIFTNHKATPIRHAIHSADVFSRRRKWWGGPCKLNVKQSVETVQLWAKIKNTRTTTTTAFATPNENDEGERSGSHACSGEQVFVPLENNYSSNDLDEEAAGSLPESGSGVFQMAEHSVNLASLLDKLKALHLHVLASEQWNASRLKLCHNNYVESAKNLIHYLALKC

SEQ ID NO: 110296 - protein, 157 aa, Gossypium hirsutum
  Clone ID: LIB3543-030-Q1-K6-H5.pep
MEVDQENRVPSTRSSSPSRKRTSLTNSLPLQPSLGNKRVGLGGRAGAPFFGSGQNPNCGSKIEKCPSCEKRLTREPQEKKKKHEPSDAIDESFGDLKKCSFSSSIYGHLHSLEIEEKRRPLPDYMENVHNGITVNMREMLMAWLVAVTEEYKLVSDT

SEQ ID NO: 110297 - protein, 195 aa, Gossypium hirsutum
  Clone ID: LIB3543-030-Q1-K6-H9.pep
QRPPTPPRIVGASLTSLLGVLAFCQSLLQVIFPPELRFACLKVFNRVFNLFSSYCYFEVGEIFFFNTNELYNAVQVYLSSSVSTNGSRLSLTRALNSSAITFGLSNNDCIVDTFNGVSVVWEHVVTQRQAQTFSWRPLPEEKRGFTLRIRKRDKSLILDSYLDYVMEKANEIRRKNQDRLLYTNSRGGSLDSRGH

SEQ ID NO: 110298 - protein, 64 aa, Gossypium hirsutum
  Clone ID: LIB3543-031-Q1-K6-A10.pep
EDINSLPLHKYQVHAPHSSYHHYNKHILCPSQFNKSNYSKTCDYNIKSSYNKLTFSIFLDQLKD

SEQ ID NO: 110299 - protein, 70 aa, Gossypium hirsutum
  Clone ID: LIB3543-031-Q1-K6-A2.pep
SNNTHLLTQNINHVTIRNEEEFSNVAQPWKHLLQLIKIPLSQVVPCYQQVTESPLPEHGHAMTSGSIKLP

SEQ ID NO: 110300 - protein, 189 aa, Gossypium hirsutum
  Clone ID: LIB3543-031-Q1-K6-A5.pep
PYHGGAQVVAGKIWSKLEGDKQQKFSNRTRHSSYIVSRYDTVKKFEAFDQVKQLRTFLPLQVSRYWQLYLTNVVLVDLLPRLGYLRVLSLSGYKITDLPDDVFENLKHLRCLNFSGTDIKYLPDSLCTLYHLETLLLKKCSKLRRLPSKMGNLVNLHYLDIRGANSIERIPFRIDKLTNLQRLSNFIIG

SEQ ID NO: 110301 - protein, 119 aa, Gossypium hirsutum
  Clone ID: LIB3543-031-Q1-K6-A8.pep
MDVLKENLAELEIGSTVESIQKFIEIQRELFHSQIDQLQNVVVTQCKLTGVNPLAQEMAAGALSIKIGKRPRDLLNPKAVKYMQAVFSIKDAITKKESREISAQFGVTVTQVRDFFNSQ

SEQ ID NO: 110302 - protein, 171 aa, Gossypium hirsutum
  unsure (1)..(171): unsure at all Xaa locations
  Clone ID: LIB3543-031-Q1-K6-B10.pep
MMHRFSRRSVSAALRAPATRYRIAAAAPISFSTPIPVSAVESDNSTRWYSAITGGKCNTTRHSSQLNLKNDLFLGSRYESTSAASDSGNPPPPPAEKYEYQAEVSRLMDLIVNSLYSNKEVFLRELISNASDALDKLRYLSVTDPQLSXDAXDLDIRIQTDKDNGIITITD

SEQ ID NO: 110303 - protein, 84 aa, Gossypium hirsutum
  Clone ID: LIB3543-031-Q1-K6-B6.pep
SGPPPFFFFFFFFFFFFFFFFFFFFFFFFFFNKWYCWLSKSRLHLTELQNPGIDKQMMTPACKPISTLLSKFQTLSCGLAPCSQ

SEQ ID NO: 110304 - protein, 191 aa, Gossypium hirsutum
  Clone ID: LIB3543-031-Q1-K6-B7.pep
VFPASDGAIGLGGIEDNVIDYWNISRIGDYCAGGKCEVRAETKATRSDSSALPSTEGSKSIFLCSQCQSKACRVCSAGRGALLLPNYSRETMNYNGLSNQVGLTTNRSEALDSVICRKCCHEIILDALVLDYVRVLISSRRKVRADSAAHNALDEVTGSSFLGSLSERSQSSGNLRAAKVLKQLLNREESL

SEQ ID NO: 110305 - protein, 200 aa, Gossypium hirsutum
  Clone ID: LIB3543-031-Q1-K6-C3.pep
RFSASVIQPYLDRQSVQNLVETLEGSDDEDEKVKVLAEFEKRLSQGFDSYFQDLILKAKVFSILELLLCDSSCSIRIQDQVALVIASLIRFNKDVFVGLVLMGPTVRALISMPSCCSIRVLSLLIKFIRIPLVDELEAHKEIPRIISLLSSENVSIQVGALDCILGIAYYGRREAIEAMLEAGLVEKLVKLQRLEKQSND

SEQ ID NO: 110306 - protein, 169 aa, Gossypium hirsutum
  Clone ID: LIB3543-031-Q1-K6-C4.pep
MNSQGVSSGEGGNDFFENLTTLGLNNEFPRSGRTTGETYVPDHMGPTNPGDMPTNPGDMLSSPTEENAEAVEKNSPAMIFLPSQSTREVLNEMIDATNNGVALTGAAATGSMGPLIGKVEIGELKDSYYFRVSLPGVSMDKREFNCVIRADGKVTIQGILTTGEQIVSN

SEQ ID NO: 110307 - protein, 78 aa, Gossypium hirsutum
  unsure (1)..(78): unsure at all Xaa locations
  Clone ID: LIB3543-031-Q1-K6-D2.pep
RVPTPFCKTPNKLSSLFCGTQXKCAACHKTVYPLEKFVTMEGECFHKTCFRCAHGGCALTHSSYAALDGVLYCKHHFA

SEQ ID NO: 110308 - protein, 194 aa, Gossypium hirsutum
  unsure (1)..(194): unsure at all Xaa locations
  Clone ID: LIB3543-031-Q1-K6-D8.pep
MENLAKNVLITSDGDEISVNIALHLAKRGCRLVLMGNECSLRSAKQKIMGSIMNVVVPEPVAVVGLDMDDEREGAFNDAVDKAWRAFGHLDALVNCHAYEGKMQDHLQLAEGEFRKIVKVNFMAPWYLLKAVGRRMRDRKSGGSVVFMTTILGAERGLYQGAAAYGSCLAGVQQLVRVSALEIGKHXIRVNAIA

SEQ ID NO: 110309 - protein, 156 aa, Gossypium hirsutum
  Clone ID: LIB3543-031-Q1-K6-F3.pep
MAPTLPSSDQASDQDNWDNGRLARKRQLLIEIVLRNKLTALVVDGDTTCRVLEQLLLRSYGVQTQGVDNGRDAVALIASGVKLDLIIIDMILPVLNGLETTRQIRDMGVHCKMLGVTICSRESERQVFLAAGVDVFIEKPLDPEHLVPILRELDGQ

SEQ ID NO: 110310 - protein, 130 aa, Gossypium hirsutum
  Clone ID: LIB3543-031-Q1-K6-F9.pep
MLELILIDDLLFALVGIEGRYISIKRVHGKADVVSFQVDSSMDLALQEFAKRIFPLCESYLLIDEFVESRSQFKHGLVNHAFAAALRAFLLDYQAMVAQLEHQFRLRRLSIQGLWFYCQPMTGSMQALST

SEQ ID NO: 110311 - protein, 107 aa, Gossypium hirsutum
  Clone ID: LIB3543-031-Q1-K6-G10.pep
MIFRASSLNPIVWGEKLLKSSSFSENQNQNQNPILIFQRFQICCLFLALCVDPKAYLVVSRGIIAMEGDVLSGLSNATQIDGKVLQTLHKSIVQVQDILDQNRLLIN

SEQ ID NO: 110312 - protein, 171 aa, Gossypium hirsutum
  unsure (1)..(171): unsure at all Xaa locations
  Clone ID: LIB3543-031-Q1-K6-G7.pep
GGGGGYTAKIPMQAIQNALRGQESENSQEALRVLDIILRQHAAKQGCLLGGGGFFFDNQNNFTDIGGGVLGCRGFHSSFRATQGGLSLNIDVSTTMIIQPGPVVDFLLANQNARDPYSLDWNKAKRVLKNLRIKVSPSNQEYKITGLSEQLCKDQLFSMKXKNAKNENGEA

SEQ ID NO: 110313 - protein, 40 aa, Gossypium hirsutum
  Clone ID: LIB3543-031-Q1-K6-H3.pep
FAQPCLRPMWLYLNVLPKHVFRVQRICKSLARNPTKELSL

SEQ ID NO: 110314 - protein, 100 aa, Gossypium hirsutum
  unsure (1)..(100): unsure at all Xaa locations
  Clone ID: LIB3543-031-Q1-K6-H4.pep
MVYDNVNKHAGWQHRSTWNDSNRAVPSXKGKALDDEAGIKFCEAGAIYFFNAEDVQFPIATDIKQTLTEXDNKAESTGLKFNKQDLAPAKLAAQNSRCCR

SEQ ID NO: 110315 - protein, 127 aa, Gossypium hirsutum
  Clone ID: LIB3543-031-Q1-K6-H9.pep
VKEWLQSLGIVDQVAVVQDDDEPDDGAFPLHNEGSSRNRNVPSIAALPILRPTLGRQQTVCDKAKVAMQGYLNHFLGNLDIVNSREVCKFLEVSKFSFSREYGPKLKEGYVMVKRLSKVTGDDDVGC

SEQ ID NO: 110316 - protein, 198 aa, Gossypium hirsutum
  Clone ID: LIB3543-040-Q1-K6-A10.pep
WDDVGETREEHGKCVFTTAQLHDLQLQTLIFKYIAGGIQVPGNVVIPIWKSVASSFGSAHGGIYERYPSFVGVSPQGLDYRNMADPEPGRCRRTDGKKWRCSKNVIPYQKYCEQHMHRGCRRSRKPVETSQSALPDSTSSKFSIRLSENSKNLPTPVSFQYTNPFSCNTSTSHGTTAIESSYVCSNRNSISINAATSG

SEQ ID NO: 110317 - protein, 79 aa, Gossypium hirsutum
  unsure (1)..(79): unsure at all Xaa locations
  Clone ID: LIB3543-040-Q1-K6-A3.pep
LPXFXSXXWDSSMXXXPXXXXXCXXLXFLGSARDXXRNXXLLXLSXXSHGAHTLLXXSLWFKLGXXYGYAXIPFYCMMP

SEQ ID NO: 110318 - protein, 169 aa, Gossypium hirsutum
  Clone ID: LIB3543-040-Q1-K6-B3.pep
GSIHGCKKLRKLNLSYCNEVSDRGLGYIGRLEELSDLEMRALHKITGVGLEAVAVGCKRLADLDMKHCEKVGDSGFWALAYYSKNLRQINLSYCGISDMALCMVMGNLSRLQEAKLVHLSNCTVEGVELALRACCVRIKKVKLFAPLRFMLSSEILEILHARGCIIRWD

SEQ ID NO: 110319 - protein, 46 aa, Gossypium hirsutum
  Clone ID: LIB3543-040-Q1-K6-B6.pep
NITFNYVRDSILWSRNHFLTRVKLGLSQILYSLFSLSFFSFSRVYL

SEQ ID NO: 110320 - protein, 99 aa, Gossypium hirsutum
  unsure (1)..(99): unsure at all Xaa locations
  Clone ID: LIB3543-040-Q1-K6-B8.pep
MPAEVEVVSFKNCPXSXVKKYQHLEDFHWAVRPLLIALGLFTAMKMGSLVGKRIGRSKAKRQSSVIHNDVQHMDHASSGNPSWLPPPVANILFGEGAAR

SEQ ID NO: 110321 - protein, 130 aa, Gossypium hirsutum
  Clone ID: LIB3543-040-Q1-K6-C2.pep
MAVAIRGARGGGSGGVGAGFRSFFSYRIFVSAMFSLLFIATATVLLTTRPSTTHQHSRFRSGGNAYMHRTFVALNSDPLKTRLDLIYRQANDHITLVKAYAAYARKLKLDISRQLKMFDDLAKNFSDITS

SEQ ID NO: 110322 - protein, 76 aa, Gossypium hirsutum
  unsure (1)..(76): unsure at all Xaa locations
  Clone ID: LIB3543-040-Q1-K6-C3.pep
PXGQHQNTEQLHFASLGGAMGGALASNTCHLTCCHSERLIIYHAQAKPYGKRCCDRYFHVYFIVLLKEVPKKKLEN

SEQ ID NO: 110323 - protein, 168 aa, Gossypium hirsutum
  unsure (1)..(168): unsure at all Xaa locations
  Clone ID: LIB3543-040-Q1-K6-C7.pep
MTSRGTFSDEPLSPAGRLFIDPKTDVVIHCIAVSKNPIDLDVAKTALKSSVMVQHPRFCSLLVRDENGFEHWRRTELDIDRHFIVIKNRLNKSGKFVGENETQGFDDDDGDGDGEGAVNQYVADLSVSSPLSMDKPLWELHLLKAHNCVVFRIHHALXDGFSLMSMLM

SEQ ID NO: 110324 - protein, 57 aa, Gossypium hirsutum
  unsure (1)..(57): unsure at all Xaa locations
  Clone ID: LIB3543-040-Q1-K6-D10.pep
VRIKTTPNCARLFLFQFFALILKEKKKRFPSRHSVYGXENDGVDYTQFPNIKPQKEN

SEQ ID NO: 110325 - protein, 190 aa, Gossypium hirsutum
  Clone ID: LIB3543-040-Q1-K6-F3.pep
FIKNAVRKVSKQVALAFVKRTLDKCQKFEQTGTSCFSESALQDVMFSVPPCSNEAKSVDCIGSGTASNICNETSNHQAEARGSGAVSSTFERFDTSDAHPGIHNKGRKREVLIDEVVGSASSRVTSTTLDGKVGGANGKRSESRDERKMKAKAKQKNNNLSSSRNGRASSPGKNHGSSTKEVEEPMDFGN

SEQ ID NO: 110326 - protein, 111 aa, Gossypium hirsutum
  Clone ID: LIB3543-040-Q1-K6-F9.pep
RSFYAVSASGICKIFSATSGWKPKWKFDRLSPPSSNVLFQEALSQPIYFSRLMKDFFFFFIKDKPPILIPWTHDKKTQIKKTLQVYGANSRRNKKNLRKPIYLPEKQTETC

SEQ ID NO: 110327 - protein, 218 aa, Gossypium hirsutum
  unsure (1)..(218): unsure at all Xaa locations
  Clone ID: LIB3543-040-Q1-K6-G10.pep
FRFYGELVHGGETMAKQGCWSLLKGGIVAEFTGVVEILLMSKAMEIRVDNVSLQPFXQRRWRSHQDKSIDKVRKKKVSFKVTYANGTAADGALILILQTKSGFPFGCGMNHYIVTDEAYRQWFASRFKVTSFTNEMKWYSTEKTRGVENYTVADAMVNFAEQNGISIRGHNVFWDNRVMQPKWVKDLPPAELMNAATRRLNSVVSRYAGRLIGWDVMN

SEQ ID NO: 110328 - protein, 65 aa, Gossypium hirsutum
  unsure (1)..(65): unsure at all Xaa locations
  Clone ID: LIB3543-040-Q1-K6-G4.pep
SVLSSLALSSTGSLTYVLVCPRDXYIIAEAAKGTGTRPLIFKQKGGDTFSSSLSSMFVSTRGLYL

SEQ ID NO: 110329 - protein, 210 aa, Gossypium hirsutum
  unsure (1)..(210): unsure at all Xaa locations
  Clone ID: LIB3543-040-Q1-K6-H1.pep
RVNFEQLVFRTVGFSGADIRNLVNEAAIMSVRKGXSKISQQDIIDVLDKQVLEGMGVLLTEEEQQKCEASVSFEKKRLLAVHEAGHIVLAHLFPRFDWHAFSQLLPGGKETAISVFYPREDMVDQGYTTFGYMKMQMVVAHGGRCAERVVFGDDITDGGRDDLEKITKIAREMVISPQNARLGLTQLXQKMGLLDRPASPDGELIKYRWD

SEQ ID NO: 110330 - protein, 167 aa, Gossypium hirsutum
  Clone ID: LIB3543-040-Q1-K6-H2.pep
IYIENSGFGTWLSGDNSNSSPTHRRVESSLVHSAPGDVDRVLYKDLVEMIPLVQSLIERKANSSFTRRGSMIYTKTPSRESLSRKTTDVKGRNAGLAIPVKKKKDQVDKIGDSLPIFSSRDLIAEKENEELIALRGQVEDLQKKLLEKEDLLKSAEISKNHINDVQA

SEQ ID NO: 110331 - protein, 210 aa, Gossypium hirsutum
  Clone ID: LIB3543-041-Q1-K6-A2.pep
RHQHCLLQPEQRRGIHGKKRVQVELDAKYGPNQSVPWSDVAKCGIKHYRPSEVAVKSSATQFSATKTGFVKLFQGGTATKSASAMPVPMKASTLPASARTKARNATIVGTSDPQTTTRDEKINSSSQSHNNTLSCSSDHAKMGEIPVKEDARSSAAGSGTVTKISGSSSRHWKFINGLPGPLGVQRETGPCNNSSLHRNSAPGKVPQSSL

SEQ ID NO: 110332 - protein, 196 aa, Gossypium hirsutum
  unsure (1)..(196): unsure at all Xaa locations
  Clone ID: LIB3543-041-Q1-K6-A4.pep
PRPLXEVMLILVKAMNNPRSALCKTSIMAASDIFNAFGEKLLDFTDSGAFDRLLLQLLLKASQDKKFVCEEADKSLKSMVNTIAPLPLLNKLSGYVNHGNLRVRAKAAVSISNSVSKMGVDEIKEFGLVKLLQMATGSLNDRLPEAREAARSIVFSVYKAFTENEDENPGEAWQSFCQSSLSPIQAQSIIKAVGSQ

SEQ ID NO: 110333 - protein, 82 aa, Gossypium hirsutum
  Clone ID: LIB3543-041-Q1-K6-A5.pep
KFSRILHPPFQQTKYWGGGNGTPESGVIMRLNILNDEIYCNIFEFDSSQMILNKICCIFLANFLPQSQSFKYRITRRSIGSF

SEQ ID NO: 110334 - protein, 87 aa, Gossypium hirsutum
  Clone ID: LIB3543-041-Q1-K6-A6.pep
VTFKVIFIVCTASKRSAIISSADLQLLTTGKQVCEEAHSPSKAEQTFVTWRCMGKPGRPSFHRILPPVPTSLFDHNPAFGCLIKAGF

SEQ ID NO: 110335 - protein, 213 aa, Gossypium hirsutum
  Clone ID: LIB3543-041-Q1-K6-A9.pep
FRNDCDGTEGGRVAVNSSKSFSSTSNPANALSFLGGVLCAKASMLLQNIAPAVLVRFLRERGGEWADFNVDAYCAASLKAGTNAYPGMRPTRFTGSQIIMPLGHTIEHEELLEVIRLEGHSFVQEDAFVSRDIHLLQICSGIDENAVGACSELVFAPIDEMFPDDGPLLPSGFRVIPLDSKSSDTQDSLTTNRTLDLTSSLEVGPATNHAAGD

SEQ ID NO: 110336 - protein, 198 aa, Gossypium hirsutum
  Clone ID: LIB3543-041-Q1-K6-B2.pep
TGDGFVRWLELEELGLDDATFLSLNLSTKFPDLLALSLCGNKLENQEKLVEEVTKFKNLKALWLNNNPVLEKSDCGMEDTILQGCPKLEIYNSRFTHNFGVWALGFCADVYGKDNPASSHQGNLPLQSVTSLDLSNRGIHNLINKAFSPFEMPNLSYLNIRGNLIEENSVSDLFGLLKAFYCLQSLEVDIPGPLGDSA

SEQ ID NO: 110337 - protein, 210 aa, Gossypium hirsutum
  unsure (1)..(210): unsure at all Xaa locations
  Clone ID: LIB3543-041-Q1-K6-C6.pep
LVTIYFGFGSAVSIDGCRKHXQKTGGDRSNHISLDSEQGTYVPPTIDEVADVSSNQSKHFDPREASYHPSIAGPWTYAFQIIYQICAGAVMLTDSVFWLIIFPFLMPKSRSLNFIVVCMHSINAVFLIGDTTLNCMRFPLFRIAYFILWTGAFVIFQWIIHACVNLWWPYPFLDLSSSYAPLWYLGIGVMLIPCYGIFALIVKLKDFSLS

SEQ ID NO: 110338 - protein, 188 aa, Gossypium hirsutum
  Clone ID: LIB3543-041-Q1-K6-D4.pep
MEAVAAVGEAFFSEMFEELLTKFNASDLINFARQKKIYAELQKLKNILQNIKAVVADAEEKQVMDRSAKIWLKELQDLAYQVKDILEKFDYEALRRKSTVKHSKVKMHCLRGLKWSGMFNVKMVSKIKGITTRLQQIASEKNSLRLGDNVGGKAHKARDHQRLPTTSVVSEIKVFGRGNEKEAILKSL

SEQ ID NO: 110339 - protein, 50 aa, Gossypium hirsutum
  Clone ID: LIB3543-041-Q1-K6-E10.pep
ICLIILKAEVPFLLLVKYGIGSACCILCIRESREKSRRSKEFYLLIMIFK

SEQ ID NO: 110340 - protein, 203 aa, Gossypium hirsutum
  Clone ID: LIB3543-041-Q1-K6-E7.pep
WKACATYKNSDCGETSESKIQDALGKAKDSDVSSSESSSSSDGRRHRRKKSAKRGKHQRGKKRKDGRRERKKSRQGKRSKRKSKWSSDSSTDSESEGTSTSGGSDDGKASLRRKKPISRSQPAEDESPQNIGLQRNKLKVTEDNSHEEGELSPKSDELANNGHGNKAAATNLHTNADGSDRLRSVSPTPKRPNNSRRSSRSMS

SEQ ID NO: 110341 - protein, 185 aa, Gossypium hirsutum
  unsure (1)..(185): unsure at all Xaa locations
  Clone ID: LIB3543-041-Q1-K6-G7.pep
FRPXTPYLHEGRGSWGAVFFPKXWREFYVYMNMRFTEDAKANPVQIPKSRTNGWQASWKKLLGDMMYLRGYVSLYPNFPNQASFSTNHMEPGAHISAKDNVVRHDKADFEVPLLIEDFRTLLPNGKLPPASKLPSLNLFNQPVSLKGLKAAGAKLGQDVLPCNNATEIVTVDHITGLPQQCSKFI

SEQ ID NO: 110342 - protein, 174 aa, Gossypium hirsutum
  Clone ID: LIB3543-041-Q1-K6-H8.pep
MDNVPADKPSSPPAKDSEVQTPAVTDSGSTNPTLDAPSKLSSWAKNLKIPQPFTTSQENSPTGNAGKSTFSRFTSGFGLRSSPKSPASDSSDGASATTQSGFLGTITKGIVDSSKNAVKAVQVKARHVVSQNKRRYQEGGFDLDMTYITENIIAMGFPAGDLSSGFFGYVEGFY

SEQ ID NO: 110343 - protein, 79 aa, Gossypium hirsutum
  Clone ID: LIB3543-042-Q1-K6-A8.pep
SDTPILLVVVGLDPLNNPHTPPNFLPFFLYFFLIVIFSIFHNTLNKLKDLHTKKQSLSDDTNFAWHPPPPPPTRGRTLG

SEQ ID NO: 110344 - protein, 138 aa, Gossypium hirsutum
  Clone ID: LIB3543-042-Q1-K6-B12.pep
MVPSGECVTDEVGKDKLRSPDTGSHALQHNTDGKIPSSQSDQGGESEKDPLSQSEKLGNASSVITKQTPSLLPGMEGSSPVACERASQDGYNWRKYGQKLVKGNEFVRSYYKCTHPNCRAKKQLERSHDGKMVDTVYV

SEQ ID NO: 110345 - protein, 214 aa, Gossypium hirsutum
  unsure (1)..(214): unsure at all Xaa locations
  Clone ID: LIB3543-042-Q1-K6-C8.pep
QRPPSVRAWQRENILYACDCSNETLQRAKEFVAASNVASVENRFRPFYCDFATTGFPKWLACANCRENLGQKDQICVSDVGEERTLETGSWSMEERSCCVGGVDFVTLIFTLSAVPLQIMPTALRECFSVLKPGGMLLFRDYGLYDMTMLRFEPDQRVGFREYMRADGTRSYFFCLDTAKNLFNCAGFIELEIEYCCVKSVNRRNGRXMQRVWV

SEQ ID NO: 110346 - protein, 106 aa, Gossypium hirsutum
  Clone ID: LIB3543-042-Q1-K6-D2.pep
EGLIPKKVHFWDKYGNGDSEMLIDPSAEQTTSWKDKVVGQSSKSDGNGVEEEEDCDLLEGDIQKSVVNGIPSIEFLDRVHQILIGDMENTVILKLLGRNIGYSILQ

SEQ ID NO: 110347 - protein, 172 aa, Gossypium hirsutum
  unsure (1)..(172): unsure at all Xaa locations
  Clone ID: LIB3543-042-Q1-K6-D8.pep
MGCLHLSSTFLSFLFLISLLSEVNPASFKIVNRCRHTIWPGFLSGANTPQLPTTGFVLNPGKSRTVTIPRSWSGRLWGRALCGQDSSGKFVCLSGDCRSGQIECSGSGAKPPATLAEFTLNGDGGLDFYDVSLVDGYNLPMLVVAKGGKGGNCSATGCLLDLXGACPPHYVV

SEQ ID NO: 110348 - protein, 77 aa, Gossypium hirsutum
  Clone ID: LIB3543-042-Q1-K6-E10.pep
SLCIVFLFNHFVIKLEAAEIISLTELDHQCSFIRFVHDNSNIIGEIAISGNGGPDMGILCCFTFTYYVFVAMHYSLS

SEQ ID NO: 110349 - protein, 216 aa, Gossypium hirsutum
  Clone ID: LIB3543-042-Q1-K6-E12.pep
AFAQRPTFYECTGVTRYLFRKDDDGLLDYLNEDGQSIEPSWYVPVIPMVLVNGSEGIGTGGVGYIPNYNPRDIVANVRRLLNGEPMEPMHPWYRGFKGTIEKTASKESGVTYTISGIVEEVDETTLKITELPIRRWTQDYKEFLESIITANDSFIKEFKQYSDDRTVHFEVFMTEENMMLAKQEGLMKKFKLTTTVSTSNMHLFDSRGMIKKYDTP

SEQ ID NO: 110350 - protein, 124 aa, Gossypium hirsutum
  Clone ID: LIB3543-042-Q1-K6-E4.pep
MIKSFSLLYIFAILLLFTSGKVNCAVCEEQLGKCDENCDFKCQTSKNGKGICDENGICKCVYECKGPGTKSCNVGIGPCSEHCSDDCCEQNCEFKYPGVQDGHGFCLDIAGIPASNQCLCYFYC

SEQ ID NO: 110351 - protein, 213 aa, Gossypium hirsutum
  Clone ID: LIB3543-042-Q1-K6-E6.pep
PLPHDDKPYQNPSSTTLLPFQAPPASPHTSATALLQKAAQMGVTLSKPLQSPVVSMQRPYYYHHQAHMCGSTTFATSRARGLSAREELGSKFTHSLSSFGNKAGVTPGFLEQVANATKSSAVAGAGAAAPSSLLHDMMTSLSCTSELEGSSSFEQSFNGTWITKRNSNNFQENYIDRRNFSETKQSQSCRSDNHEGKGSGSSSNNIGGNDRLT

SEQ ID NO: 110352 - protein, 153 aa, Gossypium hirsutum
  Clone ID: LIB3543-042-Q1-K6-E8.pep
MGKLHSSLLLRHIVNGGRNFSNFHSSFSCYFNTISPHISARGNQKKYDCFYNVDDALTLFNKMVAKHRKPSVVEFNKLLGAIVRMKHYAIVVSMYSQMELLGVSYDIYSFNILINCFCQLGYIDFGSSVLGKMMKVGVQPDVVTLSTLINGLC

SEQ ID NO: 110353 - protein, 214 aa, Gossypium hirsutum
  Clone ID: LIB3543-042-Q1-K6-F11.pep
GRVGAFGGGGLLLDEVTGGLDFEAERTVQEALDLLMLGRSTIIIARQLCLIRNVDYIGGMEEGQLVEMGTHDELVALDGLYAELLRCEEAAKLPRRMPVRNYKETSTFQIEKDSSSVHSFQESSSPKFVKSPSLQRVHGIFRPQDGAFNTQESPKAHSPPPEKMLENGLPVDAGDKEPSIRRQDSFERRLPELPKLDVQSAQQQKSNDSDPESP

SEQ ID NO: 110354 - protein, 52 aa, Gossypium hirsutum
  Clone ID: LIB3543-042-Q1-K6-F8.pep
SEHFFFLKFFSVKEGSNIHLATLYASSSAKFKRALMCLATIASFIPRCITSP

SEQ ID NO: 110355 - protein, 130 aa, Gossypium hirsutum
  unsure (1)..(130): unsure at all Xaa locations
  Clone ID: LIB3543-042-Q1-K6-G11.pep
FLSIQTKCCKSKDRPLTYLSTTVFECCSPELLRDFYFYNDYRKXWDGSVVYSLQLQVYTTSGIEIGRTIKKFPLLTPREYILALEICGKRKRYNFILFHQGDSHLKLVFHLWYLLLHFLYLSLASSYHLT

SEQ ID NO: 110356 - protein, 96 aa, Gossypium hirsutum
  unsure (1)..(96): unsure at all Xaa locations
  Clone ID: LIB3543-042-Q1-K6-G8.pep
PXXISEXFGGCLVPIYHXTGGSLSILAMLTGVWVRRXRYKAQWVQILFKXSTLGLXMTLLPHRVLGHQEXNRLSLSPPPISRGIKGKDETCGMLQG

SEQ ID NO: 110357 - protein, 160 aa, Gossypium hirsutum
  unsure (1)..(160): unsure at all Xaa locations
  Clone ID: LIB3543-042-Q1-K6-H10.pep
MALEAVVFQQDLFGCGGEDLYSLLGGNLSYEDIHFPHHNQTSDEANNNFVNGGDSYWVSSSSSPTSMAPPPPPDEATNNNVNGSSSSALDTXTSRPKRRRLKTRKNKEEIENQRMTHIAVERNRRRQMNEYLSVLRSLMPESYVQRGDQASIIGGAINFV

SEQ ID NO: 110358 - protein, 159 aa, Gossypium hirsutum
  Clone ID: LIB3543-042-Q1-K6-H12.pep
MKKLRWAIGGEVWELDASTPRTLEGAARAVPGKALPLGLSRGTKLFRPNQIDFMQRFMAAPFLPSYTHHLGVTIQRVLSIPVSENWSALLLGQFNLRKFLSSLKENGGGDGVHKRDLKSIGKLFLDKSLYALGFSSEVLLTPDDTLLLSSDSYYDHNSS

SEQ ID NO: 110359 - protein, 118 aa, Gossypium hirsutum
  unsure (1)..(118): unsure at all Xaa locations
  Clone ID: LIB3543-042-Q1-K6-H3.pep
LIWRWNGGXTXXDXDRGGLLVEAGGLPLARVLSFLCFFYYLVGLLGLLFFVSGLWYCIWALLCWXFGFKWALCIGLGVGFMVKNXGLGLFLGFYNYTFSLLFXFYXSNRYTXXXFNSI

SEQ ID NO: 110360 - protein, 138 aa, Gossypium hirsutum
  Clone ID: LIB3543-042-Q1-K6-H4.pep
TMQETEIHDLSDDADYAASQQQGSASMMQCESGKRSSSNEPEGAEVVYMKDNVTIHPTQFASERISGRLKLIKQSSSLFMTWIPYKGQSTNARLSEKDMNLYTIRAVPFADVRSIRRHTPAFGWQYIIVVLSSGLAFP

SEQ ID NO: 110361 - protein, 182 aa, Gossypium hirsutum
  Clone ID: LIB3543-045-Q1-K6-A2.pep
MEEAVSADMAVAPPSSRVSLSPFSPVRRRRRRLSVHFADLSRPVVSSATRLARVSLQGRLVNAEEASSARTVGGGLGCKEAVAWELFSPIERFLIVAVIGVATAESKKNWLISHLRKSVELRDEVLSSMQQKVDNLCEQLNNGDEKPRTGAKIEVGTPLNETFGSGSMKVDDCGCWICYQHR

SEQ ID NO: 110362 - protein, 207 aa, Gossypium hirsutum
  unsure (1)..(207): unsure at all Xaa locations
  Clone ID: LIB3543-045-Q1-K6-D3.pep
PRVRPASAMALLAPTPANTPQVPNLSEDGGLGSMLMDLPVVEEELNISEMVSANIEGQKCVITRSLLLDFAEKSECRSDNGVIITDSSASNEKTSAFHNDDIDCASIWSIQVNASTQDEYEDEETFEEMGAEYYDHEEDGGLVDDLCKCISKISMTEMFTGKHTRFIYDSDDEIGEEXKWRELEYYSSDIMRLKGLPTPKGKHLRFP

SEQ ID NO: 110363 - protein, 143 aa, Gossypium hirsutum
  Clone ID: LIB3543-045-Q1-K6-D7.pep
PPLHQLFLVKYAGPSAKHVSLNPVEEMINRFKGLTLEEKNNKPKAELQNALVLYNGAGTVVPYEGFESIKKKVRPRVDLDPETNRVWNLLMGKEGEDTEGTDKEKWWEEERRVFHGRVDSFIARMHLVQGTAYYSLVPNVDKD

SEQ ID NO: 110364 - protein, 51 aa, Gossypium hirsutum
  unsure (1)..(51): unsure at all Xaa locations
  Clone ID: LIB3543-045-Q1-K6-D8.pep
AFSXVXLFLRWXSSXXRXXSASARVAXXLVXAXSXVPGXLXAXRGPFXRFL

SEQ ID NO: 110365 - protein, 100 aa, Gossypium hirsutum
  unsure (1)..(100): unsure at all Xaa locations
  Clone ID: LIB3543-045-Q1-K6-E3.pep
RGXWGPLLXXXVFXXXLLLPXFWGPLGAVXSFSFLXAWXXXXXRXGXXLXLRVFXXXXMVSXSPPRSXCXXPSPASXXVLXWXXXCGGVXXXLXPLGFFL

SEQ ID NO: 110366 - protein, 83 aa, Gossypium hirsutum
  Clone ID: LIB3543-045-Q1-K6-E8.pep
FSKIPTEDPHLLLLLFMEVNDSFKLVGVTKDTLRLRLFPYSLRDIARAWLKSLLLGSITTWKKLVERFLLKYFPPSLTAKIQN

SEQ ID NO: 110367 - protein, 74 aa, Gossypium hirsutum
  Clone ID: LIB3543-045-Q1-K6-F10.pep
FDSLTSIIQFRACSPSSSVLCTIRAQQYTSFLFVVFQVTVVNPMYLINVNGSVPIFSPIALVFVQSCPPSSSFG

SEQ ID NO: 110368 - protein, 38 aa, Gossypium hirsutum
  Clone ID: LIB3543-045-Q1-K6-F3.pep
LIIIDMHFLTNILCRLCQRQLIHHNSAFRQAFINKLVL

SEQ ID NO: 110369 - protein, 159 aa, Gossypium hirsutum
  Clone ID: LIB3543-045-Q1-K6-F6.pep
REKKEIQKPPYETLLFFLLEYFFLLPLYPFSVCVKKGKESPLSVHFWVFYNLKTKRKENESKFLFFVFLFLCLSFFCLFVPFCCRFVVCCRYEGVQLECTEARVRSDTKVWWRTHERGACWLCSHAAPKVFQGFLLLILGCVVPWARVRWGIWARVCWV

SEQ ID NO: 110370 - protein, 127 aa, Gossypium hirsutum
  Clone ID: LIB3543-045-Q1-K6-F7.pep
RVSLSKRSFSRKCKCKYSVAPTDFVAEANNSSSYKDSDAEIVLKPAPKPVLKSEGVKNDKGLSWNAELSEGEDEDKEENERNKVIESLGEVLEKAEKLETSNVNVNVNVNKPKPVVMVVVRVVAKKL

SEQ ID NO: 110371 - protein, 92 aa, Gossypium hirsutum
  Clone ID: LIB3543-045-Q1-K6-G10.pep
TKFIVHLLFVGTNFCPGPFTIKPQNFKPKTDPILKPKYLTLTHKPQKHFSAKTLASNCLHASTTHVLHHHALHLACPANEPPARPTPHVHYT

SEQ ID NO: 110372 - protein, 73 aa, Gossypium hirsutum
  Clone ID: LIB3543-045-Q1-K6-H3.pep
LRFSHPRCSSSTVFSVTRLPMYGLYRMHRTSACNRRHSHAYMRECRVNDGKSIAVRQSDIRAIKCFFLYVTSQ

SEQ ID NO: 110373 - protein, 210 aa, Gossypium hirsutum
  Clone ID: LIB3543-045-Q1-K6-H4.pep
HFGNSGVSTRGTFGGLTGLLNLGNTCFMNSAIQCLVHTPEFARYFREDYHQEINWQNPLGMVGELALAFGELLRKLWAPGRTPVAPRPFKAKLARFAPQFSGYNQHDSQELLAFLLDGLHEDLNRVKHKPYVNSRDADGRPDEEVADEYWANHIARNDSIIVDVCQGQYKSTLVCPVCNKVSVTFDPFMYLSLPLQFATTRSMTITIFTC

SEQ ID NO: 110374 - protein, 60 aa, Gossypium hirsutum
  Clone ID: LIB3543-045-Q1-K6-H6.pep
ASAYMALSRVRVYQCTNVCILKKQVLHQMNFICLPGIFRLTHKTHIKWKMIVILRFLLFF

SEQ ID NO: 110375 - protein, 101 aa, Gossypium hirsutum
  Clone ID: LIB3543-052-Q1-K1-A12.pep
DGACIFWLGDPFFKFAANFILEKKQKSQTTTSKGCYPDTQKFRTMEQVEVIKPDVEKRVERILKLIKRKSRKRELELIGHVEEFYRQYQSLSAQYEHLKRE

SEQ ID NO: 110376 - protein, 105 aa, Gossypium hirsutum
  Clone ID: LIB3543-052-Q1-K1-A3.pep
MLSSALLLCIFFALVRLYFNKRTNHSRRRSLPVVFFGTQDDLDEDQIPQVDNPIWYINTVGLQQSVIDSITVFKYKKYDGLIEGTECSVCLNEFQENESLRLLPK

SEQ ID NO: 110377 - protein, 152 aa, Gossypium hirsutum
  Clone ID: LIB3543-052-Q1-K1-B1.pep
MVLSFSSVILVSVLILSYGVNSEPVQDKQALLTFLSMVKHENRIQWNSSTSACDWVGVECDATRSFVFTLRLPGVGLVGSIPPKTIGLLNRLRVLSLRANRLSGTVPADFSNLTLLRSLYLQENQFTGSFTSSLTRLTRLVRLDLSSNNFTG

SEQ ID NO: 110378 - protein, 103 aa, Gossypium hirsutum
  Clone ID: LIB3543-052-Q1-K1-B10.pep
FRIIFRYSEGHILATCAYPNSFVADATTVEAKTCLQAVTVAEELGFRRLVVEGDSRHFVGRAVNRAAHTIAKEGNQWPSAMIWVKEAPSRVEAVAEEDRRALF

SEQ ID NO: 110379 - protein, 127 aa, Gossypium hirsutum
  Clone ID: LIB3543-052-Q1-K1-B8.pep
MGNPKQKWTAEEEEALRAGVAKYGKGNWKLIQRDPELSPFLFARSNIDLKDKWRNLSGGPGGHGSREKSRASKPKPSSDGSQGAVVVKQTALPKPLVDDSSKSFAPNRYNEMIIEAISALKEPNGSD

SEQ ID NO: 110380 - protein, 64 aa, Gossypium hirsutum
  Clone ID: LIB3543-052-Q1-K1-B9.pep
WQFLSLEEHVLLVIKTYRLRSYLDGTMLVPPFVVTSYGGLPVETLFLLNLSSKMLLSLRGSCPL

SEQ ID NO: 110381 - protein, 176 aa, Gossypium hirsutum
  unsure (1)..(176): unsure at all Xaa locations
  Clone ID: LIB3543-052-Q1-K1-D7.pep
LLKSDAQILKILKSVTSSSSSSTSKPLTLADLALSATCREVSDLSLSSVQSTIEALVLQLTHQILSGQGFSFTVPSRSSSNQLYVPELDRIVLKDKSTVRPFSHIXSVRKTTINRKILSLVHQLCLKNIHVTKRDLFYTDVKLFQDQVQSDAVLDDVSCILGCTRSSLNVIAAEKG

SEQ ID NO: 110382 - protein, 79 aa, Gossypium hirsutum
  Clone ID: LIB3543-052-Q1-K1-E1.pep
LSETARHSFSDDDCIGNEPLREAATLAAASIGSGMSHTATTLQIPLSAKQKQTQREEEKRNLGFSIKNKINKTLENRKF

SEQ ID NO: 110383 - protein, 175 aa, Gossypium hirsutum
  Clone ID: LIB3543-052-Q1-K1-E3.pep
PNQSNILPPTLQLPGSRLKAALSARDMDLDMELFGLESHHLHQHKQLIDEISGISSPTSWNNPLSTASAFSASGDRNGELNRFGGVKPTSLEDIFGSLDPINLPQLQGNSLDAAAPQLQSPTGLRMRQNINQQLRASYPTNLASSPVRASPSFGIDPSGPTAATLLSSRSAAFAN

SEQ ID NO: 110384 - protein, 81 aa, Gossypium hirsutum
  Clone ID: LIB3543-052-Q1-K1-E8.pep
ELLLSLVISFFLKKCDNDVFRKRIEKKNLENTQIRNHLQFRWLFSLFQYAYFEKKRNPYNRISKGLYSRIIKGKKIKNKIK

SEQ ID NO: 110385 - protein, 112 aa, Gossypium hirsutum
  unsure (1)..(112): unsure at all Xaa locations
  Clone ID: LIB3543-052-Q1-K1-E9.pep
KLIHEGVKFSLPEFVGFIRGYEQELKLNQENLRPSLKVMVKDLWRPLDDGVIKINFDVAFQKEDXITTTEVLARDFTGEIVGAETYLIEEVADAFVAEALACERALSSGRGR

SEQ ID NO: 110386 - protein, 159 aa, Gossypium hirsutum
  Clone ID: LIB3543-052-Q1-K1-F1.pep
KTALKSTAMILPPRGTVIFFILLAVTFPEAVDSLSFSQYKTLVSLSQSLLTRVSNLRSARGDADGSNRARLIAEKLERWQGVGFWGAAWSVGWDYVWNYAWGSDLDYAEIFGVASDLNQLGRMLGELTRSNSDTERASWVAGNYRNALAISKRIFNRLL

SEQ ID NO: 110387 - protein, 140 aa, Gossypium hirsutum
  Clone ID: LIB3543-052-Q1-K1-F5.pep
QLDSNGRISSSGTFTVLSYNILSDTYASSELYSYCPSWALSWPYRRQNLLREIVGYRADIVCLQEVQNDHFEEFFAPELDKHGYQALYKRKTNEVYGGNIHTIDGCATFFRRDRFSHVKKYEGEFNKAAQFLTEGAGQTT

SEQ ID NO: 110388 - protein, 57 aa, Gossypium hirsutum
  Clone ID: LIB3543-052-Q1-K1-F8.pep
VTTGTLHPPHSLIPLLGRTPSAKTAHYYINMHQLHDQRDSSCNQDSFSHNLTEKQLP

SEQ ID NO: 110389 - protein, 70 aa, Gossypium hirsutum
  Clone ID: LIB3543-052-Q1-K1-G1.pep
SCNSLIILSSFSFCAEVIISSGNIKFIAISKNIYDINIFSIYLFFLLLSLINNYFIIVTNIKTFKYIKKI

SEQ ID NO: 110390 - protein, 140 aa, Gossypium hirsutum
  Clone ID: LIB3543-052-Q1-K1-G3.pep
MVNAILYHQTSPLLLCQCCSSSHPPHIPRGLPGKLTLNCSIKSPPNKVIASHIVSGLASLIFLSQTNQVLAADLSHHPSICQLASATDNELTLPLEEDSGEGNGKLMMMRGMTAKNFDPVRYSGRWFEVASLKRGFAGEG

SEQ ID NO: 110391 - protein, 179 aa, Gossypium hirsutum
  unsure (1)..(179): unsure at all Xaa locations
  Clone ID: LIB3543-052-Q1-K1-G5.pep
ATNRLLYPSQAFDLIHWSRCRINWTRDXMLKAGGYFVWAAQPVYKHEEILQEQWKEMEDLTARICWELVKKEGYIAIWRKPLNNSCYLNRDTGVLPPLCNSNDNSDNVWYVDLSACITLLPVNGYGSNVSTWPARLHDPPDRLQSIEMNAYISRKEIFRAESKYWNEIIDSYIRAFRWK

SEQ ID NO: 110392 - protein, 120 aa, Gossypium hirsutum
  unsure (1)..(120): unsure at all Xaa locations
  Clone ID: LIB3543-052-Q1-K1-H9.pep
ESLQRTNEESSRKKRAKLAEADVSEEDQTNLLKYLEKKETEYMRRQRHKMGVDDXELLTMIGKGAFGEXVCREKTTGQVYAMKKLKKSEMLRRGQVEHVKAERNLLAEVDSNCIVKFYCS

SEQ ID NO: 110393 - protein, 63 aa, Gossypium hirsutum
  Clone ID: LIB3543-053-Q1-K6-B10.pep
QMHGFRIAERSCISKHYFLTWFNERVICLEEHLESSCWQNGQLSSSMYGQYISVAKLTMCLFR

SEQ ID NO: 110394 - protein, 40 aa, Gossypium hirsutum
  Clone ID: LIB3543-053-Q1-K6-D12.pep
MLVLFIFFFFFFFFFFFFFFFFFFFFFFFFFFSKIIIFFY

SEQ ID NO: 110395 - protein, 64 aa, Gossypium hirsutum
  Clone ID: LIB3543-054-Q1-K6-C10.pep
KVRRGFGNDRSCTLCSIKLEDSLHAICDCVKAKEVWLQVIPIGKQRGFFLGSLYDWFGNNLQDK

SEQ ID NO: 110396 - protein, 46 aa, Gossypium hirsutum
  Clone ID: LIB3543-054-Q1-K6-D12.pep
NLSWLTRGGGRFYSVGVYILSWIGFSQLLRWPCKGMSFSVIKINTR

SEQ ID NO: 110397 - protein, 212 aa, Gossypium hirsutum
  Clone ID: LIB3543-055-Q1-K6-B12.pep
PASDCNKGWGAGGQRNMLCPNQMIEMDQQGQGYLHPEPCIFMGGRPNYPPPDIQMGVAGAGNATSLDTHPLPEHYDSGMFYGLPQYPGVQHHNHSPNLDLGIGSASNYYIPYVANPSSSAPVNHGPADQMPSSSNFNLLGVSANEYARNCHFMDNVRGSYKRKNSEGVPGNFQHFNASSSSSSSVTPLSSRHPDGVGTMDGASFNIPQYRGN

SEQ ID NO: 110398 - protein, 179 aa, Gossypium hirsutum
  Clone ID: LIB3543-055-Q1-K6-F12.pep
MVVCKCRKATKLYCFVHKVPVWGEGVCFPEHQICVIRTYSEWVIDGEYDWPPKCCKCQAIFEEEAGSEKTRLGCLHVIHTNCLISHIKSFPLHTASAGYVCPSCSTSIWPPKSVKDSASRLHSLLKDAVMQTGMEKNLFGNHPVSLNTPEPSGPPPAIMRYNGNSSASVAKDEGYSSVG

SEQ ID NO: 110399 - protein, 50 aa, Gossypium hirsutum
  Clone ID: LIB3543-056-Q1-K6-D11.pep
MVVFKANIVLPAFIFHFPSAPLASSAFGCITSLPLTTSHIQDIMQVDHVL

SEQ ID NO: 110400 - protein, 207 aa, Gossypium hirsutum
  unsure (1)..(207): unsure at all Xaa locations
  Clone ID: LIB3543-056-Q1-K6-D12.pep
ALNCSAYGRGEEKELTACLNLATDEKKXLEEESRDYSEKLAEAENLVEILRDDLNMTQQKLESIENDLKAAGLRESEVMEKLKAAEEELEQHVKVLEQASARNSELESLHKSLSRDSEVKLQELMESFTNKDSEAKSLFEKLKSFEDQLKVYEEQVAQASGQSATLKEELDQSLKKLASLESTNEQLXKVMLEVENKALQSTSENEL

SEQ ID NO: 110401 - protein, 52 aa, Gossypium hirsutum
  Clone ID: LIB3543-056-Q1-K6-H12.pep
MADSKPDQPLMPSSSTNLPDFKKSVKLKFVKLGYHYLITHGMYLFLTPLVVI

SEQ ID NO: 110402 - protein, 190 aa, Gossypium hirsutum
  unsure (1)..(190): unsure at all Xaa locations
  Clone ID: LIB3165-002-Q1-K1-B9.9C0.pep
FDAPEKRGQPSKIPTKQNXREALKWVVXGCQPGDSGVFHFCGHGSRQKDYTHDKVDFFDETLRPLDHEPEGNIIDDEINDPIVKPVTRGTTLHAIIDACYSGTVLDLPFVGRMNKEGRYMWEDQRNPLFYKRTSGGLAFWYSAXEEHQTCADTTVFTGTSVRTGAMTYSFAQAIQNDRRLTYGHLLNAVR

SEQ ID NO: 110403 - protein, 172 aa, Gossypium hirsutum
  Clone ID: LIB3196-057-P1-M1-E3-F24.pep
VRLIRALLIFAQLYWLCVAFLAFDVMFVVICVAVASLIGIAVCCCLPCIIAILYALADQEGAPDEEIERLLKFKFLTVKNSEKVNGEIRETQGGIMTGLDTESQTERMLLSEDAECSICLCAYEDGVELRELPCRHHFHSLCVDKWLRINATCPLCKFNILKNGEPSGSEQV

SEQ ID NO: 110404 - protein, 42 aa, Gossypium hirsutum
  Clone ID: LIB3582-058-E4.F4A.pep
NFLPRCLFLLPGQILRLDVLGYCTPKPALSLYSFAVSWVDSK

SEQ ID NO: 110405 - protein, 111 aa, Gossypium hirsutum
  Clone ID: LIB3582-058-E4.R4A.pep
SMILNLSYDDAAVAVYMRLLRISFYHGCHKLLFGAKRMVGFNIDMTSSNVVSFFRGDMFDLAKRIVEQKGSGYLWCFQRLHLATSKLVTTSPNTVILGFFGSAQACNFHAT

SEQ ID NO: 110406 - protein, 60 aa, Gossypium hirsutum
  Clone ID: LIB3272-056-P1-N1-E6.pep
KGGVPESRYVQVASDGTGRQVYYTVTPCQAMAPAATAGGVAALNQDGKVPVNAKAPPQTF

SEQ ID NO: 110407 - protein, 93 aa, Gossypium hirsutum
  Clone ID: LIB3272-056-P1-N1-F12.pep
APKDCRVSGWLQGRDLDVTVDADKMFLLAEFTYDLEKSNAQTFDVLDTAGIGIVDTVRLDFSSNHGSASHTCIYRLRVHGHEPDSVLMVKTEL

SEQ ID NO: 110408 - protein, 43 aa, Gossypium hirsutum
  Clone ID: LIB3272-056-P1-N1-E8.pep
TQLFFCFPTSFSPFTTWNFHLLLRLTPIDGLSTHSCNNTRSHV

SEQ ID NO: 110409 - protein, 72 aa, Gossypium hirsutum
  Clone ID: LIB3272-056-P1-N1-E9.pep
VFGVASHSFTIVGQNGAYTKRSFTNSLTLASAQVVDVLLCANVNVGHYYITARPSSGTYITNGILRYLTTSS

SEQ ID NO: 110410 - protein, 97 aa, Gossypium hirsutum
  Clone ID: LIB3272-056-P1-N1-F11.pep
RPLLSCIAYAFAFAISSPVGVAIGIVIDATTQGAVADWIFAISMGLACGVFIYVSINHLLAKGYAPQKMVSVDRPHHKFLSVLLGVGVIAVVMIWDT

SEQ ID NO: 110411 - protein, 77 aa, Gossypium hirsutum
  Clone ID: LIB3272-056-P1-N1-D7.pep
YSLVHVSIDSYMSACSIDNDSQPTGLLQWKCKTFKTMSIIHHPLALLVYKICFILPSRSRYRPLPALSLARTISRTL

SEQ ID NO: 110412 - protein, 44 aa, Gossypium hirsutum
  Clone ID: LIB3272-056-P1-N1-D8.pep
VLRLPLLKPETPQIKRLVTSSLDSWRPQNDIPMKNSTPTRIFTF

SEQ ID NO: 110413 - protein, 37 aa, Gossypium hirsutum
  unsure (1)..(37): unsure at all Xaa locations
  Clone ID: LIB3196-040-P1-M1-G1.pep
LIFSIYVECFELNNVVGWCSGYDFHHDXXANWTGRGT

SEQ ID NO: 110414 - protein, 67 aa, Gossypium hirsutum
  Clone ID: LIB3196-041-P1-M1-A1.pep
TPGRPGPVLQVRPERRVTRSTVRSGVLAVKALHVPRPGTETKITVTDTIGDRVKTIYRSEARLPNWE

SEQ ID NO: 110415 - protein, 38 aa, Gossypium hirsutum
  Clone ID: LIB3196-047-P1-M1-G2.pep
NVMVCFVYSRGVKVLANYLKKDSNSVELSIESNLSFVK

SEQ ID NO: 110416 - protein, 130 aa, Gossypium hirsutum
  Clone ID: LIB3196-005-P1-M1-D11.pep
MRPLVPPADAVGHGSHVASIAAGNAGVPVTVNGFYYGRASGMAPLARVAVYKAVYPTVGTLADVVAAIDQAVADGVDILTLSIGPEEPPQDTVTFLSIFDIAMLFARRAGVFVVQAAGNSRPGPSTVLSY

SEQ ID NO: 110417 - protein, 54 aa, Gossypium hirsutum
  Clone ID: LIB3196-032-P1-M1-E12.pep
PHAPGSLLKPNMDPPCSHSPRVAPEVIDDNTGGSVADHPCCRTRYYGLVCWGTK

SEQ ID NO: 110418 - protein, 122 aa, Gossypium hirsutum
  unsure (1)..(122): unsure at all Xaa locations
  Clone ID: LIB3196-033-P1-M1-H5.pep
GSAAWSRYLGSTQLVXERNPPTITRMAHAREAMDRVKAPDGETQPMTEVDLFVSTKRIKVLTADSQEAMMDHALHTISYIADIGCVLVLMARRRLARRPAPQDHGRRLYKMLCHVFHAEDAQ

SEQ ID NO: 110419 - protein, 58 aa, Gossypium hirsutum
  Clone ID: LIB3272-060-P1-N1-H6.pep
STCFPQKREMPIKLSPKKLNGECMPFCFDVRKMLAIFGVVHFLPMVICLKKKNLACET

SEQ ID NO: 110420 - protein, 59 aa, Gossypium hirsutum
  Clone ID: LIB3272-060-P1-N1-H9.pep
AYILETILIKHSLVYQCLIPNSAHSNMPNYINSYPSTSIKTMNQTKLRFHLQSSKSPPF

SEQ ID NO: 110421 - protein, 65 aa, Gossypium hirsutum
  Clone ID: LIB3272-060-P1-N1-G8.pep
PLKPVGQVGLCLFVGSKGYFGPDLGCEFRYGCNGYLGYSSRVEFLGLILGFSFWAVVSGFVFWVL

SEQ ID NO: 110422 - protein, 55 aa, Gossypium hirsutum
  Clone ID: LIB3272-060-P1-N1-H10.pep
FKHRALIWKLLNRLLSFPSSLKLFIKCPNFLSLSNYKRMFKPSLNPREKAFHNHP

SEQ ID NO: 110423 - protein, 57 aa, Gossypium hirsutum
  Clone ID: LIB3272-060-P1-N1-F9.pep
ILTFSLLLAFRVVLPPSKVFRMDFYLVCFLWPFVMLLEPLIYFRVGVIHFRLAHIGF

SEQ ID NO: 110424 - protein, 35 aa, Gossypium hirsutum
  Clone ID: LIB3272-060-P1-N1-G1.pep
HPIGDSILSRSWGLFFTLKAVIHKCFHVYQSPTPR

SEQ ID NO: 110425 - protein, 45 aa, Gossypium hirsutum
  Clone ID: LIB3272-060-P1-N1-G12.pep
KKPDRIASKSNRSPKKAVKFGVGTRHYYRKLGYELEGPYMVKYLV

SEQ ID NO: 110426 - protein, 83 aa, Gossypium hirsutum
  Clone ID: LIB3272-060-P1-N1-G4.pep
GEKQQKVFQYWTGNSKKTNFKPLPYKIFYPLAPLLYGKQFNLWAHNFTVIGKLEGFNLKNNARGILKKFLGVLSRLINCGRSY

SEQ ID NO: 110427 - protein, 89 aa, Gossypium hirsutum
  unsure (1)..(89): unsure at all Xaa locations
  Clone ID: LIB3272-060-P1-N1-F1.pep
VMVKKMVEKLMEDKFKADKSKLPGICAXSWEFELSSIFVETDTPLGLCGTRSTIALTISAGEEVGFYEKYLEKGEWFEKTINYNLQKQI

SEQ ID NO: 110428 - protein, 108 aa, Gossypium hirsutum
  Clone ID: LIB3272-060-P1-N1-F12.pep
TVVFAIASLLEWLGINELSVGISVLALAFGSYLSWLRVSQKLHTMNQILVGAVVGSIFSVLWNLSWHAVVLQAFNSSLWVRVIVLLACAEFGLGFLTYVIQYWLKDER

SEQ ID NO: 110429 - protein, 46 aa, Gossypium hirsutum
  Clone ID: LIB3272-060-P1-N1-F5.pep
IHAKRVTIMPQDIELARRDQGRACLISISVDQSLTRSMCLSLDVKH

SEQ ID NO: 110430 - protein, 82 aa, Gossypium hirsutum
  Clone ID: LIB3272-060-P1-N1-D12.pep
MELIPGLPNDIALQCLVRVPYNKFSNISSTCKDWKVEIHSPPFFRQRKAAGCTKHVMLMTQSRVNPNQNSGLKCHAMPVYRI

SEQ ID NO: 110431 - protein, 45 aa, Gossypium hirsutum
  Clone ID: LIB3272-060-P1-N1-D3.pep
EVRSAGEILVLLVLSIKGDVMVTQFVPWSGDGELDRCFAAKKNSL

SEQ ID NO: 110432 - protein, 41 aa, Gossypium hirsutum
  Clone ID: LIB3272-060-P1-N1-D4.pep
NHKTGLIGSKLVSNQNLTTCIRVLQFNATMLIHIHRLNDLS

SEQ ID NO: 110433 - protein, 64 aa, Gossypium hirsutum
  Clone ID: LIB3272-060-P1-N1-D5.pep
KKKQKTGLNGAYLNGGFFWFKLQTPFPQFRDCFFLKPMFKGKRVWQVLTLGKTMEGHKQRGLPS

SEQ ID NO: 110434 - protein, 69 aa, Gossypium hirsutum
  Clone ID: LIB3272-060-P1-N1-C2.pep
YSKTYTCEISLPFIYKLPTRIIRLHQKAILRSFILFSCYPNCSIFELTDGRILEQSRVTRSLFKNCKTT

SEQ ID NO: 110435 - protein, 51 aa, Gossypium hirsutum
  Clone ID: LIB3272-060-P1-N1-C3.pep
PSYEITIILNRSYIPKKIRPTLTMAPSQSQIPCPKAIKRFPSLFTKLDLNH

SEQ ID NO: 110436 - protein, 55 aa, Gossypium hirsutum
  Clone ID: LIB3272-060-P1-N1-C4.pep
NRDSLVMLLIDASCLCDMPYCFWAMHAEFLRLNFTLMLSVTPVEYCFCWDSIPHY

SEQ ID NO: 110437 - protein, 72 aa, Gossypium hirsutum
  Clone ID: LIB3272-060-P1-N1-A5.pep
LNSWKQWSSINAGSIFLGLRASRKAAENGYIPPDVLTSQMQPKIKSGAKYGGVMLRTKFFGNGDSAGIRESV

SEQ ID NO: 110438 - protein, 66 aa, Gossypium hirsutum
  Clone ID: LIB3272-060-P1-N1-B11.pep
AVVKSSVDPQRDFKESMVQMIMENNITASKDLQDLLACYLSLNSDEYHEIIIKVFKQIWFDLIDVR

SEQ ID NO: 110439 - protein, 94 aa, Gossypium hirsutum
  Clone ID: LIB3272-059-P1-N1-H7.pep
VMDNETLKEIANAHNKTVAQVCLRWAFEQGLSFVVKSFNKERMRENLQIFDWGLSLDDHKKINEIKQRRLFPKLEMVSPSGPFKSLEELWDGEI

SEQ ID NO: 110440 - protein, 51 aa, Gossypium hirsutum
  Clone ID: LIB3272-060-P1-N1-A11.pep
IFKNPPFQVKMGSPNAFLTLNPPGKLGFELKAPDKQTCKFSVHFCGVKMFK

SEQ ID NO: 110441 - protein, 72 aa, Gossypium hirsutum
  Clone ID: LIB3272-060-P1-N1-A4.pep
LNSWNQWTSINAGSIFLGLPASPEAAGNGYIPPDVLTSQILPTIKSSAKYGGVMLWSKFFDNGYSAAIINSV

SEQ ID NO: 110442 - protein, 101 aa, Gossypium hirsutum
  Clone ID: LIB3272-059-P1-N1-H11.pep
VLGFGFFFFFFSKNKCGIYSFVKFGHPHPKYLSMALAFPQHKLTLGLQRARLYPSNLCKVKINSNWAFFLVTMKQPTNCIQTFEHDIKCCPLDSFQIRTFR

SEQ ID NO: 110443 - protein, 57 aa, Gossypium hirsutum
  Clone ID: LIB3272-059-P1-N1-H4.pep
TVYEQSHEKTNEIIFGAVQDQEGKREAVVIRPIDYGDKTYYHQNFRFRSNLGYCGGY

SEQ ID NO: 110444 - protein, 78 aa, Gossypium hirsutum
  Clone ID: LIB3272-059-P1-N1-H5.pep
RFSQGVSKASKDQLAFFAFSWGPRTCIGKNFAMIEAKVALAMILQHFSFKLSPSYSHAPYTVMTLQPQHGAQIILHQI

SEQ ID NO: 110445 - protein, 73 aa, Gossypium hirsutum
  Clone ID: LIB3272-059-P1-N1-G1.pep
TLSGCKRTGCTFIVAGRKVDGTFKVLEDFDVPEVLKDMFVPIPAERFRMDISSTEIRRKLWTVAAFYFILGLN

SEQ ID NO: 110446 - protein, 46 aa, Gossypium hirsutum
  Clone ID: LIB3272-059-P1-N1-G12.pep
ALPYFPLLVCIPSTISIYMVSSLSRILHNLHKSPVFYVSDQIKYTY

SEQ ID NO: 110447 - protein, 87 aa, Gossypium hirsutum
  Clone ID: LIB3272-059-P1-N1-G4.pep
KQNLKTFLISFCKITHKNHITLCCYHPILAKRVTKKRVKTLTELFVLGNTALSIRDLYFCQIYIGKRKKISMLKIYQFISSKDQTDE

SEQ ID NO: 110448 - protein, 49 aa, Gossypium hirsutum
  Clone ID: LIB3272-059-P1-N1-G5.pep
PRNRTKISDTILHMPSKYQREFIIRIMSVHDINTSQWDTVPSLVLRCYD

SEQ ID NO: 110449 - protein, 73 aa, Gossypium hirsutum
  Clone ID: LIB3272-059-P1-N1-F12.pep
NFQKEYSETILKLYHSQKLKEVEFDNLKSSSTVEGYPTDDLEQTGAYLCLNLQTNKGKSDPPMVVYLLHKNGV

SEQ ID NO: 110450 - protein, 115 aa, Gossypium hirsutum
  Clone ID: LIB3272-059-P1-N1-F3.pep
NITKMFLFKVKRSNPNCKCSLTCIYCLSHITKKEQWCHHSSRDICLCPFSSLIFVVVADFRHLSAYEGMFLFTLSAFFPINKSHLSKVEHITNLQQRTLGRCDTLAHPLVTFLPL

SEQ ID NO: 110451 - protein, 78 aa, Gossypium hirsutum
  Clone ID: LIB3272-059-P1-N1-F5.pep
TKCVVVQASYLIVHNHLKVQTLKSLLTKAITKLVSGQIHLLPAKRKCPELSCKVCILNYDDNQSSSFKRRFNLLTKFG

SEQ ID NO: 110452 - protein, 41 aa, Gossypium hirsutum
  Clone ID: LIB3272-059-P1-N1-E10.pep
MRIYHKHGTLWQLSTTNSIVLYMNKYYYTMQKGSLRTIQVV

SEQ ID NO: 110453 - protein, 81 aa, Gossypium hirsutum
  Clone ID: LIB3272-059-P1-N1-E12.pep
ESVSGFCSDSVLNMPASVVLLWLSYVVVGGSWCYFVQAGIVPASLVVSYTWTLLDFAPSILQFQMTLFSFNFRIDHFFYFD

SEQ ID NO: 110454 - protein, 63 aa, Gossypium hirsutum
  Clone ID: LIB3272-059-P1-N1-F1.pep
NFVAFHPRFKLLLVALKSFLTFSTSSTRKRKLSRKCLCSARLIQFQKLQPAQPAEQLEAFLFC

SEQ ID NO: 110455 - protein, 79 aa, Gossypium hirsutum
  Clone ID: LIB3272-059-P1-N1-C7.pep
CGAGLDPIAKSLRFRLDVQTDNQTRDRFARLAVYINLDRSLILQIFVDGVAQRVEYEALSTVCFACGKYGHVQEMCLSF

SEQ ID NO: 110456 - protein, 70 aa, Gossypium hirsutum
  unsure (1)..(70): unsure at all Xaa locations
  Clone ID: LIB3272-059-P1-N1-D1.pep
TTYLVHKEPLRTVGYCSNIYDTFLAGAVYCNDGPCVWTTXPYLIMTMSGHTPANPKPTELMPNLWTALQK

SEQ ID NO: 110457 - protein, 56 aa, Gossypium hirsutum
  Clone ID: LIB3272-059-P1-N1-D3.pep
DMHQSSLGNSLPASQYCCCVVRDKGHPLWIVRAMFSFFYTRIAPVGSYLLVKLELM

SEQ ID NO: 110458 - protein, 41 aa, Gossypium hirsutum
  Clone ID: LIB3272-059-P1-N1-D4.pep
KGGKTFFLIKDRWAVKNWDPHCKKNRVKLQPKQVLQILLDG

SEQ ID NO: 110459 - protein, 56 aa, Gossypium hirsutum
  Clone ID: LIB3272-059-P1-N1-B10.pep
FACNLECKIKRVGCTINVLQLVGAIQENHLQSGSKITFVGTQIGNLYIKYVCPYLC

SEQ ID NO: 110460 - protein, 77 aa, Gossypium hirsutum
  Clone ID: LIB3272-059-P1-N1-B5.pep
NLNPICLDPSPITKWPNAKSEAETLGTSSAVLPSHACLRTAFTHCHALRVHRTFIVRQSDPYLSRRNRSRWGSEGWS

SEQ ID NO: 110461 - protein, 77 aa, Gossypium hirsutum
  unsure (1)..(77): unsure at all Xaa locations
  Clone ID: LIB3272-059-P1-N1-B7.pep
DGGYKIPRGGLFQSVSSTIHFSENMYWFRXALITWSRLCLGFFVYTCVCLMXPRARSTRLWSLEKFSAHIISSQVKL

SEQ ID NO: 110462 - protein, 71 aa, Gossypium hirsutum
  Clone ID: LIB3272-059-P1-N1-B8.pep
IYMRGLVPQQPLSGQTSHKTFSFSSSSSSATLMHIMTHQSLFLFRQKLNSTNAPLLHQKCCYLHPIKIIQS

SEQ ID NO: 110463 - protein, 56 aa, Gossypium hirsutum
  Clone ID: LIB3272-059-P1-N1-C2.pep
QDENSPKLSSVHNPNFTINEDVLPYGAALHASLVTTYLLEAESKLRPTEGNLHDEL

SEQ ID NO: 110464 - protein, 54 aa, Gossypium hirsutum
  Clone ID: LIB3272-057-P1-N1-H7.pep
VLMCQAKTIFSSFFSVINKIYPSFSKFFLLCSSDILISSINMVSFISPPRESVV

SEQ ID NO: 110465 - protein, 62 aa, Gossypium hirsutum
  Clone ID: LIB3272-059-P1-N1-A1.pep
EREEKERKDKEREFVVHVPLPDEKEIERMVVERKKMELLSKYASEGLLEEQSEAKDMLNIHR

SEQ ID NO: 110466 - protein, 91 aa, Gossypium hirsutum
  Clone ID: LIB3272-059-P1-N1-A12.pep
ENTNRQGAIKKNSKVGVVYWHLKIILFGPEHFRGWFGPTSFKGGGFHLILDRLWGSGFGKGQVLAFLKGLVFWGLNLATFFSLPFIGIYAP

SEQ ID NO: 110467 - protein, 64 aa, Gossypium hirsutum
  Clone ID: LIB3272-059-P1-N1-A6.pep
WLLALEGLVCTRLSGEFFLGTGCCFCLSCFSVFNCCSNFVLVYRCWFIMLLRSIFVGRVIVGVC

SEQ ID NO: 110468 - protein, 58 aa, Gossypium hirsutum
  unsure (1)..(58): unsure at all Xaa locations
  Clone ID: LIB3272-059-P1-N1-A9.pep
VEKLLKRCHEXGKTNLSDYKLIPANVAYRXGNNTTLSAICLTKIKRPDTXGSKRNVDM

SEQ ID NO: 110469 - protein, 71 aa, Gossypium hirsutum
  Clone ID: LIB3272-057-P1-N1-H10.pep
SKNYSQKKKGSTPLNLHLPLSYEQTKQNENMKTIADNRQLIHAVTPYFHWPIKLQGVFLFLHVFLFFYEIR

SEQ ID NO: 110470 - protein, 57 aa, Gossypium hirsutum
  Clone ID: LIB3272-057-P1-N1-H11.pep
TVSCNSSVSFIIQVRHDKNTIRFYAYKQIKQYLTCGKVGSLSVRFSNFVYFIVLYKF

SEQ ID NO: 110471 - protein, 87 aa, Gossypium hirsutum
  Clone ID: LIB3272-057-P1-N1-H2.pep
FKKKPFGSKLKVICLQNGFFHFHGASRIYGCFCPPKAGNIFVFFGQKFLASIPFLPPFMGLIAQMIPCFLSQRFVNWESKTRFWVGS

SEQ ID NO: 110472 - protein, 57 aa, Gossypium hirsutum
  Clone ID: LIB3272-057-P1-N1-H3.pep
IIWNNAKPAYDNSYQVWNCMENTKYMSACASQIQHEHTFHRALANPIFTIFETAKAC

SEQ ID NO: 110473 - protein, 47 aa, Gossypium hirsutum
  Clone ID: LIB3272-057-P1-N1-H5.pep
PCHACKNSKKSMISLEFGLPFRQNLDLTVQTFRPLLNSPCPFISQCI

SEQ ID NO: 110474 - protein, 79 aa, Gossypium hirsutum
  Clone ID: LIB3272-057-P1-N1-H6.pep
YDNVPWRESEFLVPINVGHGLLPHFYPDFNFNAFTNYIATQGGLASLAINRKSYRILIEPCLNYELNPNLIRLRFKFWK

SEQ ID NO: 110475 - protein, 77 aa, Gossypium hirsutum
  Clone ID: LIB3272-057-P1-N1-F7.pep
SQKQATNISTRTLNRFFRSEQGYMVLRKDIATNKLRIFTPEFKQACQITTRFACTRVSPLDRECKLRFHGQISWWEP

SEQ ID NO: 110476 - protein, 37 aa, Gossypium hirsutum
  Clone ID: LIB3272-057-P1-N1-G5.pep
YKILSPTEILSEFKLCTIENYNKLQCFDIKFIHKLMP

SEQ ID NO: 110477 - protein, 58 aa, Gossypium hirsutum
  Clone ID: LIB3272-057-P1-N1-G12.pep
KNNNFKSKLRNSHMNLNNRKEDTLLDQAPPSPKGSIVSSLTFRPAISSSNPQLFSTKT

SEQ ID NO: 110478 - protein, 51 aa, Gossypium hirsutum
  Clone ID: LIB3272-057-P1-N1-G6.pep
PKKIKAYLLKAWALVNSSQVGGLHHLLEPVILKLMGGVQKNPPCGSESFAK

SEQ ID NO: 110479 - protein, 90 aa, Gossypium hirsutum
  Clone ID: LIB3272-057-P1-N1-F3.pep
TTVWKFLWSWKFLWSRSKPTSSIHHITIYIQFLITFIKKSNNIKHLNLIDKNEFTWGDNPIFCSFCEVQPLIPVVLGMYFHVGLIHKLTV

SEQ ID NO: 110480 - protein, 43 aa, Gossypium hirsutum
  Clone ID: LIB3272-057-P1-N1-F4.pep
RLIFLNYSEIFSRSIINVKNMEKKNPICKTPATHIKRIFLRLD

SEQ ID NO: 110481 - protein, 58 aa, Gossypium hirsutum
  Clone ID: LIB3272-057-P1-N1-D5.pep
FKYRCPDAYSYPKHYPSSLFSCPTRTNVNVIFCPRTVLRMLLSPFYTLFSRFYINKCN

SEQ ID NO: 110482 - protein, 59 aa, Gossypium hirsutum
  Clone ID: LIB3272-057-P1-N1-D7.pep
NLSALGNNFVLVRKGTILSFSSSDYRLSHLKLRAQANRKEKLGHLYNLQSCIAFVLSAI

SEQ ID NO: 110483 - protein, 48 aa, Gossypium hirsutum
  Clone ID: LIB3272-057-P1-N1-E1.pep
TPMERTKFKFLKACIRNATTSNGNPTSFSESITYGLGFYSSRILLTVL

SEQ ID NO: 110484 - protein, 95 aa, Gossypium hirsutum
  Clone ID: LIB3272-057-P1-N1-C9.pep
LFNFVFHVKLCLQCSKQRSNTKCSHKFLIFKYHPSSIPLQFGHLMSIFRSIYSLRTVQQNLTTTKLYFSMSSPFLPLSLLFMKLSFLVQLCCCEG

SEQ ID NO: 110485 - protein, 74 aa, Gossypium hirsutum
  Clone ID: LIB3272-057-P1-N1-C12.pep
RHGLIMGCSVTGVKPFGGDSPLKMGPKAEDVQKPVHPLVFLSRFILGTLAAAYFVLVPIYMWLKDQIVPKGQPI

SEQ ID NO: 110486 - protein, 113 aa, Gossypium hirsutum
  unsure (1)..(113): unsure at all Xaa locations
  Clone ID: LIB3272-057-P1-N1-A4.pep
VRGFVNGWLDSPFIYQIAQLFDPQSVMMGSSPRFNKYGNEFGLGKALTLRSGYAHKFDGKVSAYPGHEGGGSIDLEICLPPSSMKALELDEEFMXMLFSCGGIEYLIIKLCGK

SEQ ID NO: 110487 - protein, 50 aa, Gossypium hirsutum
  Clone ID: LIB3272-057-P1-N1-A8.pep
ASSQRLGCRSYWRFKAQCEKAKGSSIIRTKPSKLTETNIQGTSTKNPNRI

SEQ ID NO: 110488 - protein, 75 aa, Gossypium hirsutum
  Clone ID: LIB3272-057-P1-N1-A9.pep
ATATASSVTVSEGVGSTNTNTNTHISNRDFDLNMPALPEFSPANFFVSAAGDDEVQSPHPAKKPCLSIPPKIEVN

SEQ ID NO: 110489 - protein, 46 aa, Gossypium hirsutum
  Clone ID: LIB3272-056-P1-N1-G9.pep
IKKNVPHIKTGSLFFEKINHPPRFRFLVKIHCETLNAIFSPSPLFS

SEQ ID NO: 110490 - protein, 64 aa, Gossypium hirsutum
  Clone ID: LIB3272-056-P1-N1-H6.pep
KSVFSRIVSAAERPHLSILETEKGKKRKRYRRHVNSSLMFVSVGTAVTVVGLAAYRAYAARKNT

SEQ ID NO: 110491 - protein, 74 aa, Gossypium hirsutum
  Clone ID: LIB3272-056-P1-N1-H7.pep
SYSAFHPESAAMLFEDKQGYSSNSLRVVELMQPKVRLQQAIKLLSFTLAPQFLALLYFTAACVAGCFFGSKVIV

SEQ ID NO: 110492 - protein, 48 aa, Gossypium hirsutum
  Clone ID: LIB3272-056-P1-N1-H9.pep
MPKLGNTLLEETAEIYSNPEDHQKRINQIYCSRQLYCGNTTLNGGKRI

SEQ ID NO: 110493 - protein, 56 aa, Gossypium hirsutum
  Clone ID: LIB3272-057-P1-N1-A3.pep
GWFLSIIRGPPKIHRASCFLGRQKKQNTGENRGFLDGMFLNRIWKGRARLFRARKE

SEQ ID NO: 110494 - protein, 45 aa, Gossypium hirsutum
  Clone ID: LIB3272-056-P1-N1-F6.pep
CSNILTYETTMLLYYFSPILYFLWSLSIISERGPIRLSYSNVAKS

SEQ ID NO: 110495 - protein, 58 aa, Gossypium hirsutum
  Clone ID: LIB3272-056-P1-N1-F7.pep
PTSSKLLYEKASSVDKTLKLYDGMYHSLVQGEPNENADLVLKHMREWIDERVERYGSK

SEQ ID NO: 110496 - protein, 46 aa, Gossypium hirsutum
  Clone ID: LIB3272-056-P1-N1-G11.pep
LAKQVKEKLSKVDPYFDKLAEAMVTWIEAWDELNPTGSSVTNGKAK

SEQ ID NO: 110497 - protein, 58 aa, Gossypium hirsutum
  Clone ID: LIB3272-056-P1-N1-G6.pep
AAIAYLVFRPNKEATHLLALTSENQHMVDDAGNTSMYCLPREDIVSMQLPQRRQTEDI

SEQ ID NO: 110498 - protein, 46 aa, Gossypium hirsutum
  Clone ID: LIB3272-056-P1-N1-G7.pep
SSILNNLYYIYRTQTLKTCNKQTMIMTQILCENIKPSKHHKQQSHP

SEQ ID NO: 110499 - protein, 56 aa, Gossypium hirsutum
  unsure (1)..(56): unsure at all Xaa locations
  Clone ID: LIB3135-008-Q1K1-E2-FPOLYA.p
FCPSVIRSAFTCKGFPSLLPKTLKPIXGALVMPFMKKGFHKRVIKFAIIASRKPAQ

SEQ ID NO: 110500 - protein, 33 aa, Gossypium hirsutum
  Clone ID: LIB3165-033-P1-K1-H1-F18.pep
YLLEPKTDCYATPNINYSLGSESWVDSIFAAET

SEQ ID NO: 110501 - protein, 63 aa, Gossypium hirsutum
  unsure (1)..(63): unsure at all Xaa locations
  Clone ID: LIB3584-003-P1K1-A12-F20g.p
KIPFYRXFSPQMVWXXVAXSLLHCFKHPFWCGGKCANXVVCQTDASFXRXXXCVXXGVPFLTL

SEQ ID NO: 110502 - protein, 132 aa, Gossypium hirsutum
  unsure (1)..(132): unsure at all Xaa locations
  Clone ID: LIB3584-003-P1K1-A12-F21g.p
HVHTDAAIINGSRVSKRSTPLLPWHAPTIATAGTLRVXPICIPLVSRWQGFPVRACGVAGVVYDDRHHAGREPGVLPQDAGDLVKNKWCPHARGKGRAGIRHCGNRPSWRREKEDKSRHRKXEHHRTMFSGP

SEQ ID NO: 110503 - protein, 65 aa, Gossypium hirsutum
  Clone ID: LIB3196-004-P1-M1-F12.pep
TVYVIYSEVAVFQLLPLNTLSHSILTNKIPSFPLFHDNLVFEKHLQFPHVSFVPCHFNLLKEGIL

SEQ ID NO: 110504 - protein, 125 aa, Gossypium hirsutum
  Clone ID: LIB3196-045-P1-M1-H4.pep
LSRSRCVSRAFSRSLSAFQKGNCPLGRRSLPGVSLCQGPGYPNSRKVVINNNSVFSVRFFRTTAVCKDDLVTVKTPAFAESVTEGDVRWEKAVGDTVAEDEVVCEIETDKTSVQVPSPANGVIEA

SEQ ID NO: 110505 - protein, 57 aa, Gossypium hirsutum
  Clone ID: LIB3272-033-P1-K1-B4.pep
RPLQSLIGFLQASNFLFLHYFGASESQASKFRSLCLKIHPSLDYFLKIYFWSRFFKI

SEQ ID NO: 110506 - protein, 104 aa, Gossypium hirsutum
  Clone ID: LIB3272-033-P1-K1-E4.pep
MQLLHAPSWPHLSFQTSDRNSKGGLLSLEKCLQLSTANCSFQPQKLERSIWVSHKRNFFSFCATKATSVEAGSSAASSGTAEGDVLKALSQIIDPDFGTDIVTC

SEQ ID NO: 110507 - protein, 61 aa, Gossypium hirsutum
  Clone ID: LIB3048-003-Q1-L1-D2-F2.pep
MFLLGTVVAMGSYTVFIGSCSQALKDRIPRITEKLTWASSLVAIALGVAIIVSQFFGFSLY

SEQ ID NO: 110508 - protein, 49 aa, Gossypium hirsutum
  Clone ID: LIB3048-008-Q1-L1-E11-F2.pep
SVNMKVRFSPGLYRANFFKCSLFVMISLWLASFAIVVSSRIACKGLEYC

SEQ ID NO: 110509 - protein, 32 aa, Gossypium hirsutum
  Clone ID: LIB3048-015-Q1L1-E10-T3A.p
AASAISCSVSCEFDVIHGTSHAVLNEKKAAVV

SEQ ID NO: 110510 - protein, 33 aa, Gossypium hirsutum
  unsure (1)..(33): unsure at all Xaa locations
  Clone ID: LIB3048-019-Q1L1-D11-T3A.p
NIISANLMGSFRAXQLGYDPHLLILPSGTMFIL

SEQ ID NO: 110511 - protein, 56 aa, Gossypium hirsutum
  Clone ID: LIB3048-032-Q1-L1-E7-R2A.pep
FPGRRAHYSAGGLIFCCDDNRLRREEVLFQTLFHIMYRHVVCRKKTMDGNTLNLCA

SEQ ID NO: 110512 - protein, 52 aa, Gossypium hirsutum
  Clone ID: LIB3048-033-Q1-L1-G1-T3A.pep
VLFQTTFEYKPRFPLAITEYGIKILTSKDLGRIPCLCACDHNIRPFKNFFLA

SEQ ID NO: 110513 - protein, 57 aa, Gossypium hirsutum
  Clone ID: LIB3083-003-Q1-L1-A12.pep
ISYKIYDIYMLKKQSSDFLIRFNKNKNILYDNFIITYFSHLIFIKQISKKTASLRER

SEQ ID NO: 110514 - protein, 84 aa, Gossypium hirsutum
  Clone ID: LIB3083-003-Q1-L1-A2.pep
ELADPSSYSNPGHICWQHNITIGAGKNETLDRDLDPEFKPVLLEPGHLKSLQTILLYHIVPATIDRNSWTKSTSALTHHYTLSN

SEQ ID NO: 110515 - protein, 24 aa, Gossypium hirsutum
  Clone ID: LIB3083-003-Q1-L1-A3.pep
MHFHLGYLTVQEQINLNVYFKIPL

SEQ ID NO: 110516 - protein, 111 aa, Gossypium hirsutum
  Clone ID: LIB3083-003-Q1-L1-A4.pep
FFGQCFNATGFQPSINGLKEIQAFLEATPSDIITIFIEDYVASPQSLTNVLNASGLTQYSFPVSKIPNNGEYCPTLYHMVKQNQRLLLFTSKSTKDAFEGIAYQWRYALEN

SEQ ID NO: 110517 - protein, 96 aa, Gossypium hirsutum
  unsure (1)..(96): unsure at all Xaa locations
  Clone ID: LIB3083-003-Q1-L1-A8.pep
KVGIATVAPKARWTSERKVPADLRYEVPXPYLAWALYTSSVKNPHXTGPGHDGNALSHLYHHASFYEQDKDGIRYPRATYSTIRNIRFCHERSILA

SEQ ID NO: 110518 - protein, 49 aa, Gossypium hirsutum
  Clone ID: LIB3083-003-Q1-L1-B1.pep
MLRAKHIGNLSNGARTFLFSVSRGTAAHGNSCTCPEDESCISRKHNIIN

SEQ ID NO: 110519 - protein, 47 aa, Gossypium hirsutum
  Clone ID: LIB3083-003-Q1-L1-B10.pep
RLVVLSFIYMSIYPNTVVTFRYIHAEVRLQFRCNSAFRRLQFSKKAK

SEQ ID NO: 110520 - protein, 73 aa, Gossypium hirsutum
  Clone ID: LIB3083-003-Q1-L1-B12.pep
LNVNDLCQSNPAYEELTPYIDCTPNWRVWLAYDHYKIILTASEQSYFYSVDCYMSQYPYPGHDCENSLIRTCI

SEQ ID NO: 110521 - protein, 43 aa, Gossypium hirsutum
  Clone ID: LIB3083-003-Q1-L1-B3.pep
TSISQHIIPLTQFYYKNTSNPSPKHSFKNLDHSNFNTTNLKQS

SEQ ID NO: 110522 - protein, 70 aa, Gossypium hirsutum
  Clone ID: LIB3083-003-Q1-L1-B6.pep
SSCHGIPAPTQFTFLPNSSITDDVSNHTLLFHLEAALFKAYSLFPYFTLIAIQACGLSRAFISLFQYPLD

SEQ ID NO: 110523 - protein, 49 aa, Gossypium hirsutum
  Clone ID: LIB3083-003-Q1-L1-B8.pep
FSAMTYGDGYGAVTATIVHVVLFHGREIWIQSKASFQEKNMDIHTILMR

SEQ ID NO: 110524 - protein, 66 aa, Gossypium hirsutum
  Clone ID: LIB3083-003-Q1-L1-B9.pep
SSVISTIVMALESFVRHYVIGGDHIILINDVANWFRHSNIVAAFSPRYPLYVLSIHAIIWSHAFCK

SEQ ID NO: 110525 - protein, 48 aa, Gossypium hirsutum
  Clone ID: LIB3083-003-Q1-L1-C1.pep
FLVMFNVNGGQVCMIISFEVIIKASIVSALVIRFDLLINVLTEYMFNY

SEQ ID NO: 110526 - protein, 71 aa, Gossypium hirsutum
  Clone ID: LIB3083-003-Q1-L1-C4.pep
MPPIILITYKPSITPHNPSPPTSTCCFVLYHTDIRCLCSYNNSQLLPTLDIDPNLSMKLPILCKLPNSTNC

SEQ ID NO: 110527 - protein, 120 aa, Gossypium hirsutum
  Clone ID: LIB3083-003-Q1-L1-C5.pep
DMYFTLKVDYGKDKFQPTFVNERLAMKREYEEFKVRINALVAKAQKVPSKGWIIQNGTPWQGNIPKNPPGLIKDFFGKSGGHDTQGNELPRLVYLSRKKRPGFLHYKKTGAMNALVRVLG

SEQ ID NO: 110528 - protein, 75 aa, Gossypium hirsutum
  Clone ID: LIB3083-003-Q1-L1-C9.pep
VYSKNDNHEGVGKLVGMNRDNHILKTRWTFSAADTNMLETVRLILLRYPVCSLNAPMLTYVQSSHIPCLIQLMNL

SEQ ID NO: 110529 - protein, 68 aa, Gossypium hirsutum
  Clone ID: LIB3083-003-Q1-L1-D12.pep
ESLAMHMFLIRPDSVHIALGFRTTMHEDMSAYTTRRSWMACARFRALVSMISVSLLILMILFSTMGAL

SEQ ID NO: 110530 - protein, 110 aa, Gossypium hirsutum
  Clone ID: LIB3083-003-Q1-L1-D2.pep
PIPPANTNTSTIHFNYTPSITSATSNSKTIFYIPTSTFIAFKPSLTPPNPSPPTSTYFYPLSHTYIPFLCSYKNSHLLPFLPIYPNLSMKIPNLFKLSHTPNTYFLYLHI

SEQ ID NO: 110531 - protein, 104 aa, Gossypium hirsutum
  Clone ID: LIB3083-003-Q1-L1-D6.pep
SNELGPATGLPPLMDSSPYNGRKSEPVFADSRYVPCFSNPIGSQTNQQITIDHNFNYRTLHVSSNPCHVLPQNPFYAAEFESLGSVQEQSMLRTLIENHGSKVQ

SEQ ID NO: 110532 - protein, 65 aa, Gossypium hirsutum
  Clone ID: LIB3083-003-Q1-L1-D8.pep
KPILSLLRAILDMYLLIDTLLTTIELPKEVNESIQHMYFFITKLPFSNQSTVNHVIHIYQNYNIT

SEQ ID NO: 110533 - protein, 52 aa, Gossypium hirsutum
  Clone ID: LIB3083-003-Q1-L1-E1.pep
KLYIKLKLESINTCIHSKKPQWVIWSKLYILFPSYKELLLTIKMYVFHLKFD

SEQ ID NO: 110534 - protein, 58 aa, Gossypium hirsutum
  Clone ID: LIB3083-003-Q1-L1-E10.pep
RDPLRKLHQFTSDNVLLNNINYGINIENTIEINVFKLKHAEPAGQILELLISSSRNAL

SEQ ID NO: 110535 - protein, 43 aa, Gossypium hirsutum
  Clone ID: LIB3083-003-Q1-L1-E11.pep
SMRDESFFFLAIFGVIQSDFFVLVHCVDLQRHCIQSQTGFMHS

SEQ ID NO: 110536 - protein, 104 aa, Gossypium hirsutum
  Clone ID: LIB3083-003-Q1-L1-E12.pep
FILCFAYQVKGYIKRTGSAHGWDVLFYIFSFLKGITLFTLIVLIGTGWSILKPYLQDKEKKVLMIVIPLQVVANICQIVIDETWPFNQDWNTWKQVFLLVDVVC

SEQ ID NO: 110537 - protein, 53 aa, Gossypium hirsutum
  Clone ID: LIB3083-003-Q1-L1-E2.pep
SFKLINVNYTPSSVPLKVIFNISYHLKTNSFISISISINYLLIYTHFTTIYIT

SEQ ID NO: 110538 - protein, 75 aa, Gossypium hirsutum
  Clone ID: LIB3083-003-Q1-L1-E4.pep
SINPPYLLRGCFTYEVLYLFQSPFTELSSSNSHFSYLFIFLKFLSCNILSLRLKFNSLKIVSSNGSLFLRRLNLF

SEQ ID NO: 110539 - protein, 69 aa, Gossypium hirsutum
  Clone ID: LIB3083-003-Q1-L1-E6.pep
KFQLFFSQKSVWLIISHFNLSSPPKKVSFLWFFGALYSFFSHFHFQSFLFRFFVPLPPLFQWIPGLNSK

SEQ ID NO: 110540 - protein, 93 aa, Gossypium hirsutum
  unsure (1)..(93): unsure at all Xaa locations
  Clone ID: LIB3083-003-Q1-L1-E7.pep
CALQESQIPLIIIPENDGNKYLTPNLEADHIASWLKAYNEGQVAPYVKCQPISVENTVPLNVSXTDTLNDIYLKSGIDDLLEIYATWYQHCQK

SEQ ID NO: 110541 - protein, 105 aa, Gossypium hirsutum
  unsure (1)..(105): unsure at all Xaa locations
  Clone ID: LIB3083-003-Q1-L1-E8.pep
ILEHEAIGGLVTXCGWNSILEGVVAGVPFITWPIFAEQFYNEKLVTQVLNLGVSIGNQVWKAWATEDSLVIKSGDDILMAINALMGDTEEAFDMNKRAKKLGELA

SEQ ID NO: 110542 - protein, 32 aa, Gossypium hirsutum
  Clone ID: LIB3083-003-Q1-L1-F1.pep
PASFYTIPSNFTRVVKPTMCYNKSHYKSLTIN

SEQ ID NO: 110543 - protein, 46 aa, Gossypium hirsutum
  Clone ID: LIB3083-003-Q1-L1-F10.pep
LFLLYLHRNPGLILCSLSKNSTLESNSPCYSSFLISYIHPSIPETI

SEQ ID NO: 110544 - protein, 55 aa, Gossypium hirsutum
  Clone ID: LIB3083-003-Q1-L1-F12.pep
SCHDNSDGQNDEEAVVYKGASQSCYNPWDFSTASRSLAEYTTCSFSTLTFLPCNS

SEQ ID NO: 110545 - protein, 73 aa, Gossypium hirsutum
  Clone ID: LIB3083-003-Q1-L1-F2.pep
ILLQFPLTFMSRYFPLYYYFSFSFYYISQFPSSSNPIVTLSFSLLFEIKDFNLLILIPICKLKSEITCCCFIY

SEQ ID NO: 110546 - protein, 77 aa, Gossypium hirsutum
  Clone ID: LIB3083-003-Q1-L1-F6.pep
YLSQPLNARSLPEIPCLGMINLEITSTVVGLVHLAAVGGTNQVTSTSCCYNHAPNLPGIFFYIFHSFGKHYGKLFEH

SEQ ID NO: 110547 - protein, 45 aa, Gossypium hirsutum
  unsure (1)..(45): unsure at all Xaa locations
  Clone ID: LIB3083-003-Q1-L1-F8.pep
QTTSGPLVVGMVPMKGHSDAAAMQTGAXNGCQCGDNCTCKPCNCK

SEQ ID NO: 110548 - protein, 92 aa, Gossypium hirsutum
  Clone ID: LIB3083-003-Q1-L1-F9.pep
VSVSSHRRQAVVVLDILGHSLYHHLGCPALVLVLFICLQHRFRTSISSLKMLLQTRYMCWAKSSLIISAREAWRFIEERKRNEGSLKQGIIE

SEQ ID NO: 110549 - protein, 54 aa, Gossypium hirsutum
  Clone ID: LIB3083-003-Q1-L1-G1.pep
LQLILYLHYNFIKRPLHFHHFYHYTHIIFMKILFIFYHLLLNQKIYVNNISINY

SEQ ID NO: 110550 - protein, 62 aa, Gossypium hirsutum
  Clone ID: LIB3083-003-Q1-L1-G11.pep
RCRLGCKHGDTFVRGSRFIVSNSRRTGACMIGDFVSIRASNCYKPTHLQIVHMNRVSFQNKT

SEQ ID NO: 110551 - protein, 66 aa, Gossypium hirsutum
  Clone ID: LIB3083-003-Q1-L1-G2.pep
CAELNYIVHASKSSKNSNNTIATAFEVKSVFKMDGMDLVADPGQHSVIHVVVGYESVRAMGASVKP

SEQ ID NO: 110552 - protein, 113 aa, Gossypium hirsutum
  unsure (1)..(113): unsure at all Xaa locations
  Clone ID: LIB3083-003-Q1-L1-G3.pep
YFRFPFTSWVPTHLNNFCTKIKNRITDHIHQPCLHTGYSYCQLYCLXHAIQPDXHMPHDKTVPXSDDASNTLYTETAAAKHVHTAASEDLEPTVIHEVTTGTYRLLFHPEQLI

SEQ ID NO: 110553 - protein, 56 aa, Gossypium hirsutum
  Clone ID: LIB3083-003-Q1-L1-G9.pep
HLSNTASIHRGGTTSKCLQTLEPPYNLRSSDRPTELLIQLSHEPATHALRYVLYHQ

SEQ ID NO: 110554 - protein, 61 aa, Gossypium hirsutum
  Clone ID: LIB3083-003-Q1-L1-H1.pep
RRIPFAEVFARIDAVDPSTVKRVAILLIYTRDIAINAMGPIIGLCDSNWFRRRTFWIRYYD

SEQ ID NO: 110555 - protein, 95 aa, Gossypium hirsutum
  Clone ID: LIB3083-003-Q1-L1-H5.pep
AMCRDLDISETYWKLVKEHVSMKEGSALLATLLSFQDQIYALDRVWVLSGLGHDYGLDIEGIKKAAVLHYNGNMKPWLDLGNSKYKEYWKKFLNP

SEQ ID NO: 110556 - protein, 85 aa, Gossypium hirsutum
  unsure (1)..(85): unsure at all Xaa locations
  Clone ID: LIB3083-003-Q1-L1-H6.pep
MKDANKCIVYNNDAIYDVPYLSVYLTTKAHANLNHNDIRYMIRXMLCETDXTTHLYTLIVRPYANYIIIITHVDKQTGSLYTDRN

SEQ ID NO: 110557 - protein, 123 aa, Gossypium hirsutum
  unsure (1)..(123): unsure at all Xaa locations
  Clone ID: LIB3083-004-Q1-L1-A1.pep
VEVDAIGHVRHKNXVRXLGYCIEGVHRMLVYEYVNNGNLEQWLHXAMRQHGTLTWEARMKVIIGTAKALAYLHEAIEPKVVHRDIKSSNILIDDDFNAKVSDFGLAKLLGSGESHITTRVMGT

SEQ ID NO: 110558 - protein, 59 aa, Gossypium hirsutum
  Clone ID: LIB3083-004-Q1-L1-D3.pep
MMHKMLLVLTEKKTMEVLLIQLKRCETINFWRLNLVNCIFSKKLMTAGTNQNLLWLGIG

SEQ ID NO: 110559 - protein, 43 aa, Gossypium hirsutum
  Clone ID: LIB3083-004-Q1-L1-D7.pep
YPSNSYLKPSIMDTIACGFSYSRLTIPYEKLSVLVSADHLYAP

SEQ ID NO: 110560 - protein, 108 aa, Gossypium hirsutum
  Clone ID: LIB3083-004-Q1-L1-D9.pep
LFDEYGFPSTAGDITYIDYLFLGDYVDRGQHSLETITLLLALKIEHPENVHLIRGNHEASDINALFGFRIECIERMGENDGIWAWTRFNQLFNCIPLAALIEKKIICM

SEQ ID NO: 110561 - protein, 109 aa, Gossypium hirsutum
  unsure (1)..(109): unsure at all Xaa locations
  Clone ID: LIB3083-004-Q1-L1-E3.pep
KRGPPGLQEKXANIKGADLFGKTGLEVDRLNDHLPDLAESSNKARAMIYPTPKKASKLVEVLPGICEIVDKEHKRLSARKSIIDKRNEEQYRQLLEMEHEEYSKKHYLL

SEQ ID NO: 110562 - protein, 44 aa, Gossypium hirsutum
  Clone ID: LIB3083-004-Q1-L1-E7.pep
RISISCALQLNNKTDNYAAFKVEATQSKTCCVRPNTGDAVALYT

SEQ ID NO: 110563 - protein, 73 aa, Gossypium hirsutum
  unsure (1)..(73): unsure at all Xaa locations
  Clone ID: LIB3083-004-Q1-L1-F3.pep
MGNRGDNANGGGIIPHGDQGFTASTPEXXERXAGTLERATKGQKLHISCKNKSKRGKSACGKDTIQKDRVVML

SEQ ID NO: 110564 - protein, 48 aa, Gossypium hirsutum
  Clone ID: LIB3083-005-Q1-L1-A3.pep
GIILRANAYSECWPLMMTIDLNDNKGNNGLPLTTAAYGHSYRDYQHLT

SEQ ID NO: 110565 - protein, 134 aa, Gossypium hirsutum
  Clone ID: LIB3083-005-Q1-L1-A5.pep
RFGIDFDCDLRFKSRQLIAVTVLRKLARTVCIHWCYKRTMLGSREVDDLSDLKQAILGACLNECVGGDRSGVDDLIEQGHQSKPSQKCLGKRASLSTTVSPPEYDVDEIETSLRWLFSEDLAQSSWSCSASFPT

SEQ ID NO: 110566 - protein, 67 aa, Gossypium hirsutum
  Clone ID: LIB3083-005-Q1-L1-A6.pep
RLQLHTQVLSSEACITGAAARPCLLKQPICDRNDYDKRDTGCMTKAIEQENALRELRAKGSQKGSLG

SEQ ID NO: 110567 - protein, 65 aa, Gossypium hirsutum
  Clone ID: LIB3083-005-Q1-L1-B10.pep
SHIIVRIISRYPSKSPKTDLKSNQNLNRTALDASASSILMRCASANRFKRNKEHSYQNPASKIRK

SEQ ID NO: 110568 - protein, 97 aa, Gossypium hirsutum
  unsure (1)..(97): unsure at all Xaa locations
  Clone ID: LIB3083-005-Q1-L1-B4.pep
MTEAAVHGPRVRMKDIQGMPGTKGGLFLRLSQFIFSIISVSVMATTNDFRSATAFCXITVLIDNDLDKCSVNHCTKFETATAMAVISWFAMSPSFLL

SEQ ID NO: 110569 - protein, 61 aa, Gossypium hirsutum
  Clone ID: LIB3083-005-Q1-L1-B5.pep
ACAPGLSIKQDALQHPIEEWFIGDDEVGSSSHRNGHRRPVVVYFIAQVPQVSCARCALGVG

SEQ ID NO: 110570 - protein, 98 aa, Gossypium hirsutum
  Clone ID: LIB3083-005-Q1-L1-B8.pep
SWTTVHQLMDADSCTWDRTLLLKIVDENSADRNVAIAIYGSRPQDRVDWKHESCGEHTVKSGYEVLFADYLQSTGYMPIIDEVYIDYYKDLMALSITG

SEQ ID NO: 110571 - protein, 74 aa, Gossypium hirsutum
  Clone ID: LIB3083-005-Q1-L1-C6.pep
FQHVNDLFSLLHDQPQLFQVANILLQASQLLPLEQLWLLYRQLALVLDPSQFDLIHLSLYKICCLNHRPLEFPQ

SEQ ID NO: 110572 - protein, 93 aa, Gossypium hirsutum
  unsure (1)..(93): unsure at all Xaa locations
  Clone ID: LIB3083-005-Q1-L1-D1.pep
DDASNTFLRETGAGKHVPCAVFRGLEPIVIXDEMRTGAYRQMFLPEPLICGSVDGANNYARGHYSIGKGIADVWLHRINGLADDXTGLEGCTC

SEQ ID NO: 110573 - protein, 66 aa, Gossypium hirsutum
  Clone ID: LIB3083-005-Q1-L1-D11.pep
FPSIALTPASALLQSEAARMINARFNDYFKDLLMRIGHLTRCFFTSSICLARTQLNVSLKPNAFCV

SEQ ID NO: 110574 - protein, 65 aa, Gossypium hirsutum
  Clone ID: LIB3083-005-Q1-L1-D12.pep
VTETDFKNCCDQFGTITDVVVMYDHNTQRPRGFRFITYDSEDAVDRVIHKTFHELKGKLGEVKRA

SEQ ID NO: 110575 - protein, 138 aa, Gossypium hirsutum
  Clone ID: LIB3083-005-Q1-L1-D5.pep
EAECDRFFSLLDKLSAAVPEQKEAAKELRLLTKKVPSFRALFGESVDAITQLLTPLTRCNSQSGVHPDLQEDVITTLLNLSIHDSNKKLVAETPMVVPLLMEALRSGTIETRSNAAATLFTLSALDSNKVLIGKSCVL

SEQ ID NO: 110576 - protein, 114 aa, Gossypium hirsutum
  Clone ID: LIB3083-005-Q1-L1-E11.pep
EKLKDLREKLAIEKACGIIITALDEVARLYNIRGSDVSYCPVIHASAIVTLNSAFLYVDKKKVSSKVSSSIQENGIEVREYSTVSSDVALLASNQLDKDTGSSSGQNGVCESGT

SEQ ID NO: 110577 - protein, 92 aa, Gossypium hirsutum
  Clone ID: LIB3083-005-Q1-L1-E7.pep
MATPFSSLEPGRGGGGGIAMMAGPLNPIDPSTPSKSCLKNSGSKSTILIFQFFHKAIKAELDALQRAAMAFATNHHDSDLTSLMERCHLLRT

SEQ ID NO: 110578 - protein, 73 aa, Gossypium hirsutum
  Clone ID: LIB3083-005-Q1-L1-E9.pep
FSVHGTMYIALSDLSQCHSQVESLPIVISLAGGGSPIISSISDGSAGVQLLVGLHHKPYHTVTRPGSCPPASV

SEQ ID NO: 110579 - protein, 101 aa, Gossypium hirsutum
  Clone ID: LIB3083-005-Q1-L1-F1.pep
HPMTLTLEHFDDMVRSGAPFARKFAKDDDSALNKIDKELLRRSNGRFTPGGWCVEGSNSGKDPCVVYGNPNAVKPTVSSKRLEKLLVQLLDSGNFRSNQCK

SEQ ID NO: 110580 - protein, 88 aa, Gossypium hirsutum
  Clone ID: LIB3083-005-Q1-L1-F2.pep
MVWFQCEDCGENLKKPKLPNHFRICSASKLSCIDCGVIFGQQNVQSHTQCMTEMEKYGPKGQGKTPNGSISKPNKQTREKPDIDINVG

SEQ ID NO: 110581 - protein, 104 aa, Gossypium hirsutum
  Clone ID: LIB3083-005-Q1-L1-F4.pep
MPCFKLPLFLFLSSLFLHASLAEIICEDLPNDVCAFAIASSGKRCLLETGLEKNEKEEYQCRTSEVMVERMAEYIENDDCVRACGVDRNSIGISSDSLLEPQFT

SEQ ID NO: 110582 - protein, 107 aa, Gossypium hirsutum
  Clone ID: LIB3083-005-Q1-L1-G12.pep
LSTAVYTPCSTNSALGLFFSSQYSFLPHYSASSIYNRFQFHYPLHKTYNPSKNFFIPTYSTYNTTHFLPLLSYIPNPYFSFLTTTPPNFFSYYKFYIKYSSNNTPKQ

SEQ ID NO: 110583 - protein, 64 aa, Gossypium hirsutum
  Clone ID: LIB3083-005-Q1-L1-G4.pep
ICSLLPMIFELACYHLRRTYLWPCFWLLVMHLSLLALVPFILLKCLTWPLVPLMLRSPMSFFPM

SEQ ID NO: 110584 - protein, 50 aa, Gossypium hirsutum
  Clone ID: LIB3083-005-Q1-L1-H10.pep
HAAPIRNLRPNVACVQYERSTWIAQTTMDETDDLYLDADNTTEATLRFRC

SEQ ID NO: 110585 - protein, 38 aa, Gossypium hirsutum
  Clone ID: LIB3083-005-Q1-L1-H12.pep
ASSMVKKGRVVVIFIRWHRPRTVMGPESYTILPSCSSF

SEQ ID NO: 110586 - protein, 94 aa, Gossypium hirsutum
  Clone ID: LIB3083-005-Q1-L1-H5.pep
KKLKNLTLSDCNCLGDRGLEAIATGCTELTHLEVNGCHNIGTIGLESVGKSCPRLTELALLYCQRVGNFALTEVGRGCKYLQALHLVDCSSHGD

SEQ ID NO: 110587 - protein, 68 aa, Gossypium hirsutum
  Clone ID: LIB3083-005-Q1-L1-H8.pep
GIEEYHGTGNITQSCQNPDKKNKHFNLNDHHSRKGVIIPDLWSCLICLILLNLLNRISYNFLMIFFQG

SEQ ID NO: 110588 - protein, 123 aa, Gossypium hirsutum
  Clone ID: LIB3083-007-Q1-L1-G3.pep
NIEALTLGRGQLGYVFFHALVECSMLRSLDVNDAILGNGVQEIPINHDRLCDLKVTKCRVMRISIRCPQLKSLSLKRSNMAQVALNCPLLNLLDISACHKLTDAAIRSAVTSCPQLESLDMSN

SEQ ID NO: 110589 - protein, 72 aa, Gossypium hirsutum
  Clone ID: LIB3083-009-Q1-L1-A7.pep
TTSPNSQQLTPIRKRHQPASYTKNTLFIITTKFLIYNSQCSFLKPKIDINFTATIHCLRSRSSSYRPIFTNQ

SEQ ID NO: 110590 - protein, 42 aa, Gossypium hirsutum
  unsure (1)..(42): unsure at all Xaa locations
  Clone ID: LIB3083-009-Q1-L1-A9.pep
RLGYGALKWIRQKLXLLXXISCWLHSFINKPNXXSLRVIQKG

SEQ ID NO: 110591 - protein, 61 aa, Gossypium hirsutum
  Clone ID: LIB3083-009-Q1-L1-B10.pep
KRPVAQRNLTQSDCKIILPHFLPLLISNTNGSYSYLDSPNCCNIFSDLFNSLLFILIYEPN

SEQ ID NO: 110592 - protein, 62 aa, Gossypium hirsutum
  unsure (1)..(62): unsure at all Xaa locations
  Clone ID: LIB3083-009-Q1-L1-B11.pep
FYIIFPRVLPIKPLSPSLSLKSLLLPSLSPQSSXYPYTLSPCSSSNSPFLFLSLSNSIXSNS

SEQ ID NO: 110593 - protein, 57 aa, Gossypium hirsutum
  Clone ID: LIB3083-009-Q1-L1-B12.pep
INFFNSHKSLKIIHTLYKFHTQNSIKHQILFITYSIFTLQTNHPHFSSIISFKHLHT

SEQ ID NO: 110594 - protein, 47 aa, Gossypium hirsutum
  Clone ID: LIB3083-009-Q1-L1-B9.pep
NKSATHIVSQYIHHYYIQTTSISKSFPLYTNKSISHLDQPKTSLFIH

SEQ ID NO: 110595 - protein, 79 aa, Gossypium hirsutum
  Clone ID: LIB3083-009-Q1-L1-C10.pep
SKLLKYTLFSIISKTLTLITNLTLTNNIFDIPTIDTNKTYLLSTNTTNNITTNYIFTNNIYTNSYTYHPTNISTNLINQ

SEQ ID NO: 110596 - protein, 88 aa, Gossypium hirsutum
  unsure (1)..(88): unsure at all Xaa locations
  Clone ID: LIB3083-009-Q1-L1-C2.pep
LAKLFICKVCVLKADWKSMFKDGFGIDLKCMDGSSXEGNTFMKAFYDANEMVYWRYVDPFLKGKRSLNIGYEAALKNNIQIIHNYLHN

SEQ ID NO: 110597 - protein, 40 aa, Gossypium hirsutum
  Clone ID: LIB3083-009-Q1-L1-C7.pep
RSLPPNLCQRLSGKLGDYSFLSQIPSKAILLLLFILFKLN

SEQ ID NO: 110598 - protein, 45 aa, Gossypium hirsutum
  Clone ID: LIB3083-009-Q1-L1-C8.pep
PHFFLLINHNLDSSYEIKNNYFNILSNAYIKTSSSTPSIILPIPI

SEQ ID NO: 110599 - protein, 107 aa, Gossypium hirsutum
  unsure (1)..(107): unsure at all Xaa locations
  Clone ID: LIB3083-009-Q1-L1-D3.pep
SPHPLQYVVNAXLVAILYSDDLDATHTPGXYCRPNYYSTDVLREYAKTHIDYILGKNTRKMSYLVCFCYHYTKHVHHTGASIPKNKIKYHFKGGWKWRDTLKPNPNT

SEQ ID NO: 110600 - protein, 71 aa, Gossypium hirsutum
  unsure (1)..(71): unsure at all Xaa locations
  Clone ID: LIB3083-009-Q1-L1-D8.pep
SLDDFFFLNPXXQLVRFIHMLERLLQSPNSSFIDVQCQCCFNITTVFSHSLSVLVCQNCHNILSQPTLCIS

SEQ ID NO: 110601 - protein, 110 aa, Gossypium hirsutum
  Clone ID: LIB3083-009-Q1-L1-D9.pep
NFISSALSLKSVAFKRCVRLFIYRQLNTATTSSPTFIKFYTPTTAYIYTYSIYKTFITYLITFTFTTINHITINSFNYPLLSTYYLLHILIQTSHPNRSHFQLLQLIFST

SEQ ID NO: 110602 - protein, 60 aa, Gossypium hirsutum
  Clone ID: LIB3083-009-Q1-L1-F7.pep
NYLYLAILNNTGPFLLHLMAITPHNINPNDTFPMINCSFEQTSHILLYTSVYAKSYYYML

SEQ ID NO: 110603 - protein, 77 aa, Gossypium hirsutum
  unsure (1)..(77): unsure at all Xaa locations
  Clone ID: LIB3083-009-Q1-L1-F9.pep
SFIYPQVGXNXCCGLYXERWDRIHRXDPYSNRNTLFFDVNMKGLDXIQFPFYVLTSCVFNXQALYCLCPPSMPSFPN

SEQ ID NO: 110604 - protein, 112 aa, Gossypium hirsutum
  unsure (1)..(112): unsure at all Xaa locations
  Clone ID: LIB3083-009-Q1-L1-G8.pep
AILFLQVVHGYTGGFFQGPLINQTAFQNVHTFIHNTISKRAKLLLARKIHILQMTFYXPTIVTDVNNDILFTXSXIYLPVSPIMXFKTYQQTIHIANNTKSVLATFIFTNTC

SEQ ID NO: 110605 - protein, 39 aa, Gossypium hirsutum
  Clone ID: LIB3083-009-Q1-L1-H7.pep
ANKKKKCFFWGFCTLLNHAKSPKYYPLSLFLQNLENPLH

SEQ ID NO: 110606 - protein, 53 aa, Gossypium hirsutum
  Clone ID: LIB3083-009-Q1-L1-H8.pep
MQAYHHSTQKLHQFFLYQMLPSKKYMHTTHLFHLYPKPNNILSNSNYKLKTFY

SEQ ID NO: 110607 - protein, 89 aa, Gossypium hirsutum
  Clone ID: LIB3083-013-Q1-L1-B11.pep
HSCCYKQKLRKGVWCPEEDEKLLRHITKYGHGCWSSVPKQAGLQRCGKSCRLRWINYLRPDLKRGTFSHEEENLIIELHAFLGNLWSHI

SEQ ID NO: 110608 - protein, 68 aa, Gossypium hirsutum
  Clone ID: LIB3083-013-Q1-L1-D10.pep
FNEINTLILCFFKFIYIFYYLFFFLFFIYYIFFFFFYFIFSFFVIIFFYIIFIFYFIFFYLLFFLFIF

SEQ ID NO: 110609 - protein, 37 aa, Gossypium hirsutum
  Clone ID: LIB3083-013-Q1-L1-D2.pep
CYFNTYLALFNKPKIFPVPLCEPELKFSLTKKKKNKN

SEQ ID NO: 110610 - protein, 94 aa, Gossypium hirsutum
  unsure (1)..(94): unsure at all Xaa locations
  Clone ID: LIB3083-013-Q1-L1-F2.pep
KKWNLLWALIHMIFYIFLFLILFILSPYLIYRXIFNLLVFLFIFXFIYFIILYIFTYLLFLLSFFFFLIFNFLFFFFIFFFFYIIFIIFFYLIF

SEQ ID NO: 110611 - protein, 82 aa, Gossypium hirsutum
  Clone ID: LIB3083-013-Q1-L1-G10.pep
VFLSFFFASAAVISIVYNSLFCFVFYSFFLLISNFSCLFFFFILFFLFLFFFFFFFFYIFYIFFLLLFFFFFFFFYFYIYFF

SEQ ID NO: 110612 - protein, 84 aa, Gossypium hirsutum
  unsure (1)..(84): unsure at all Xaa locations
  Clone ID: LIB3083-013-Q1-L1-G9.pep
KKKKKKKKKKKKKKKKKKKKRKNKKKRKKKRKKKKKKKKRKKKKKKKKNKKKRKKKKKKKKKKKKKKKERKKEKEKXKKRKKRK

SEQ ID NO: 110613 - protein, 70 aa, Gossypium hirsutum
  unsure (1)..(70): unsure at all Xaa locations
  Clone ID: LIB3083-013-Q1-L1-H11.pep
LSLSFTNFFFFFFLFSLLFFHSLIYFSFFFXFFFILFLYIFFFFLYFIYFFFLLFLLFFFFSFLSLFLFF

SEQ ID NO: 110614 - protein, 71 aa, Gossypium hirsutum
  Clone ID: LIB3083-016-Q1-L1-A10.pep
KPNKKLKTPIQDHKNDITIWIESQRKINKSMKSLRDKSSECFYIINYMIPRQNLSLFNLISLKKCNKKTLL

SEQ ID NO: 110615 - protein, 69 aa, Gossypium hirsutum
  Clone ID: LIB3083-016-Q1-L1-A12.pep
DQNPPKIYTRIQDHETHHSESNWIQQNRPSLNGYILNRETISGFLFKFQFRASKSQLIKLGFKTIFSKI

SEQ ID NO: 110616 - protein, 106 aa, Gossypium hirsutum
  Clone ID: LIB3083-016-Q1-L1-A4.pep
HKATELSIELETREIVLLGHASESSGKLLRGSLVLSLTEPMKVRSVHLAFTGKMKVSWSEGIGHHQHYHKQEKDIIEHNWEFLPAVDHKKAFTLGAGQHKWDFELM

SEQ ID NO: 110617 - protein, 60 aa, Gossypium hirsutum
  Clone ID: LIB3083-016-Q1-L1-A6.pep
NTIKVTCLGYLLFIISPLVQAVANLSVETLERGLLTPKSNVWTFGIVLLELLTRRKNLDT

SEQ ID NO: 110618 - protein, 50 aa, Gossypium hirsutum
  unsure (1)..(50): unsure at all Xaa locations
  Clone ID: LIB3083-016-Q1-L1-C1.pep
KXNHPLKFFPQTYIHSTNVYLKFFFCFNPQLKEKVLHPQQFFKTIFKTET

SEQ ID NO: 110619 - protein, 70 aa, Gossypium hirsutum
  unsure (1)..(70): unsure at all Xaa locations
  Clone ID: LIB3083-016-Q1-L1-C4.pep
AFQDKTYLFPIPNGLTMESSIESIPFHVLSXKPRSYYFPNFSTSXQCEHVIXIANVNLKPSCFAFREGET

SEQ ID NO: 110620 - protein, 71 aa, Gossypium hirsutum
  Clone ID: LIB3083-016-Q1-L1-C8.pep
YVNLRILIGSSVYLLIRCVLSMILSLEASRASLYTLSVLWRICNNGCRYVLLVSIVLRERWNVFFYWMLKG

SEQ ID NO: 110621 - protein, 48 aa, Gossypium hirsutum
  Clone ID: LIB3083-016-Q1-L1-C9.pep
VYHGLCLDGWVEVGFSLGLSVLFDGSEFLRKIFWMARSGKGVCSRVIQ

SEQ ID NO: 110622 - protein, 97 aa, Gossypium hirsutum
  unsure (1)..(97): unsure at all Xaa locations
  Clone ID: LIB3083-016-Q1-L1-D1.pep
SAPANTSKYLVPAIXNSHXWKIXYNLYSPIKISSXIAFNALKTXYPSSAXGSFFLXLIEPKIKPXFDFFKQTRSYLIVYSYPFFSYSAYSDHISLYY

SEQ ID NO: 110623 - protein, 68 aa, Gossypium hirsutum
  Clone ID: LIB3083-016-Q1-L1-D10.pep
SFFHLIFALGSMCSAMLLSRWTISSDSSDLVDVGWTSVWVRICTEWVTAALYVWTLVAPLIIPDREFF

SEQ ID NO: 110624 - protein, 31 aa, Gossypium hirsutum
  Clone ID: LIB3083-016-Q1-L1-D12.pep
LELGKDESKKISSNLTNGISYYNFICQRKIK

SEQ ID NO: 110625 - protein, 86 aa, Gossypium hirsutum
  unsure (1)..(86): unsure at all Xaa locations
  Clone ID: LIB3083-016-Q1-L1-D8.pep
SYRGNLNLFSYPYXRKKLQTINIKTHCKPFFLPFFFLKKIKIHCNTCTKYLSYPLTNFFFPLYPSILSKPFYYHSPIPYYLTQYLF

SEQ ID NO: 110626 - protein, 93 aa, Gossypium hirsutum
  unsure (1)..(93): unsure at all Xaa locations
  Clone ID: LIB3083-016-Q1-L1-E1.pep
KXXFEEIALYIISYRIFKTLEIRHIHIHIHIHLPYGSSIVLSNEKNILCKPRSSSSASHSLSNLTINLLPQQPIPSTTITNFHNNSNYLNNLY

SEQ ID NO: 110627 - protein, 105 aa, Gossypium hirsutum
  unsure (1)..(105): unsure at all Xaa locations
  Clone ID: LIB3083-016-Q1-L1-E3.pep
EILSRVIHKNLXNGLYAMLKGNXRLIVYYYMPNLSLLSHLHGHHSSECHLYWSRRINIAIGSAERIAYLHHHSTPHIIHRDIKASNVLLDSDFQPQVADFWFAKF

SEQ ID NO: 110628 - protein, 60 aa, Gossypium hirsutum
  Clone ID: LIB3083-016-Q1-L1-E6.pep
KVIRFKAAVCINPCEPLVIDLIIVDPPKTWEIRIKILCTSFSHSDLTFLKISIDHIALFT

SEQ ID NO: 110629 - protein, 74 aa, Gossypium hirsutum
  Clone ID: LIB3083-016-Q1-L1-E9.pep
YHIFPFLSSKVHLDILSTNYWNSTLQPTIKSIHTTFNISPIYTGKSLSFQTANTLQNPTPNLHLIQTYHHPHML

SEQ ID NO: 110630 - protein, 104 aa, Gossypium hirsutum
  unsure (1)..(104): unsure at all Xaa locations
  Clone ID: LIB3083-016-Q1-L1-F12.pep
SIPKIAKQVFVSIKSLHTYPIKPRLKFKKFITHYVSGKRISMQYLTRQQLLVAQILETKKLSLRLVLEYVLVSTVQALVSCXXXPXQPIIHTILPTXPWTNTKS

SEQ ID NO: 110631 - protein, 41 aa, Gossypium hirsutum
  Clone ID: LIB3083-016-Q1-L1-F2.pep
SQIHIQYLSKTTCNPKIVVLSLKRYGHLMIVCTTLTFNTLN

SEQ ID NO: 110632 - protein, 120 aa, Gossypium hirsutum
  unsure (1)..(120): unsure at all Xaa locations
  Clone ID: LIB3083-016-Q1-L1-F3.pep
LVHFGSSSEVLEHLSASDSALVCLIHLCSIPATTVSDIAASSVVLSCKIADGVSIGEDSLIYDSNISSGIQIGSQSIVVGMNVPKDNDNMAGNSIKFMLPXRICFWKVPLLEFPKKVIVF

SEQ ID NO: 110633 - protein, 49 aa, Gossypium hirsutum
  unsure (1)..(49): unsure at all Xaa locations
  Clone ID: LIB3083-016-Q1-L1-G12.pep
TFHFLEFVGSKMEMKCLRIRLKPRTSSLSFILYWDYXLDGMRYDKILRG

SEQ ID NO: 110634 - protein, 53 aa, Gossypium hirsutum
  unsure (1)..(53): unsure at all Xaa locations
  Clone ID: LIB3083-016-Q1-L1-H2.pep
IRHYPPRSYTLLPYPLPSLLEYLFRSSSPTXSLLLPIYLLQSFIYSPSFLPIX

SEQ ID NO: 110635 - protein, 83 aa, Gossypium hirsutum
  unsure (1)..(83): unsure at all Xaa locations
  Clone ID: LIB3083-016-Q1-L1-H3.pep
LTGLKIHLLILRRDYWRPLRPSSKISTPINQPDRLHQLLQMSLGSLQILLIMHXPYSXGFIGTRIKSIKRLAYINTTSYSLTY

SEQ ID NO: 110636 - protein, 69 aa, Gossypium hirsutum
  Clone ID: LIB3083-016-Q1-L1-H9.pep
NHFQLTYSNVHILIQHSNTKIPAIFLVILEEAYVIISPGYHHPYRPTRTKFINKIIKRRGNQLIHNLKS

SEQ ID NO: 110637 - protein, 51 aa, Gossypium hirsutum
  Clone ID: LIB3083-017-Q1-L1-A10.pep
IKVFNTLYFCHLNILLSSYIDRYLCWYLLSRYSRNHFQSFPQMFDDISSKS

SEQ ID NO: 110638 - protein, 158 aa, Gossypium hirsutum
  Clone ID: LIB3083-017-Q1-L1-A11.pep
VEDPLQWRKDNGNWNNTPRTANKETEVEGIDAGNYHVRVRSVAANGSASGWSAIVSAGLTGKVGEPEKPINLTASDNEVFGIRVKWGMPEGSGDTAYIELHQAPNGADGHPIVDEATLLTLVPFPQYEYWHSILPAGHVVWYKARAVDKIGNVSDWTD

SEQ ID NO: 110639 - protein, 100 aa, Gossypium hirsutum
  Clone ID: LIB3083-017-Q1-L1-A9.pep
LGVAKGDTGSNNARGACVNIDAMSAIDDGMQMDSPYIKSGIIYYGDSSHAGGIGAPFNYSYVISLSENSGSVGNWTQVAFPILVNAAPKMRSRSANPGLS

SEQ ID NO: 110640 - protein, 71 aa, Gossypium hirsutum
  Clone ID: LIB3083-017-Q1-L1-B10.pep
KSPPFCTSSKLRMPVQSHTLSAIILQTFLSHAPSKSTNITMNLHITLFNPFLLISLNYTTTIYTLNLIYTT

SEQ ID NO: 110641 - protein, 89 aa, Gossypium hirsutum
  unsure (1)..(89): unsure at all Xaa locations
  Clone ID: LIB3083-017-Q1-L1-B11.pep
VVEGGVYEEVKRVVCMIYNSRSVEEVFYRIEKKLDMMYEESEFVKWYVGEGMEEGELXEVSEEIDVMEKDYEEVGDDCDEGDEEDEGDE

SEQ ID NO: 110642 - protein, 36 aa, Gossypium hirsutum
  Clone ID: LIB3083-017-Q1-L1-B12.pep
SKVRNIIPPSHGFPLSLEFEQAVEEDFEPQIITRAN

SEQ ID NO: 110643 - protein, 50 aa, Gossypium hirsutum
  unsure (1)..(50): unsure at all Xaa locations
  Clone ID: LIB3083-017-Q1-L1-B9.pep
RDLVFWYVGEGMKVGEFXEDSEVWVAMEEDYEGVGDGCDEGDVEDEVDEL

SEQ ID NO: 110644 - protein, 52 aa, Gossypium hirsutum
  Clone ID: LIB3083-017-Q1-L1-C11.pep
PSQFLISILISSLIILLSSHDIPLTNSIQSDTFPIFSTALSFYHTTLPSCII

SEQ ID NO: 110645 - protein, 72 aa, Gossypium hirsutum
  Clone ID: LIB3083-017-Q1-L1-D10.pep
MPEGEHRHPNAHRCNDQSEDDIQARYERNPSKTVPGPYKLFWQYMPSKPCMEPTQPYTYKQLDPPKRHVELE

SEQ ID NO: 110646 - protein, 54 aa, Gossypium hirsutum
  Clone ID: LIB3083-017-Q1-L1-D11.pep
CLNHLLNLAHNFKIFTFMIAIRSPFRKEKLTLAIFSTVSQIFTRSSLVVIFLNF

SEQ ID NO: 110647 - protein, 46 aa, Gossypium hirsutum
  Clone ID: LIB3083-017-Q1-L1-E12.pep
LSELISGSTSSMGFLRVSYDKLHWYWNECPHFEACLEKMDHIGKLN

SEQ ID NO: 110648 - protein, 82 aa, Gossypium hirsutum
  unsure (1)..(82): unsure at all Xaa locations
  Clone ID: LIB3083-017-Q1-L1-E8.pep
RAMKENYTVYLIRVHSPSSLPTIPAFSMVKSLHMNDMSDASMDXMFARLDPDSNAXALSRSTEIVDDVIMTQSDKLHHVNML

SEQ ID NO: 110649 - protein, 67 aa, Gossypium hirsutum
  Clone ID: LIB3083-017-Q1-L1-E9.pep
NNILSIYINLYFLLSISYSIHYRLTISIIYIAFSILFIQLLFILLFSSKNLYIYINPLKIFNTLTSI

SEQ ID NO: 110650 - protein, 75 aa, Gossypium hirsutum
  Clone ID: LIB3083-017-Q1-L1-F10.pep
KTKIVKIFYIRSDYVAGPTIAVIALKCPFIEIAFVDISLPSINAWNIYQLPIYYPGLDAVVKLFTFKNLFFITYV

SEQ ID NO: 110651 - protein, 34 aa, Gossypium hirsutum
  Clone ID: LIB3083-017-Q1-L1-F12.pep
VLYGYWGACCVCIGSALPLFKRYVGFYSFVGNNT

SEQ ID NO: 110652 - protein, 23 aa, Gossypium hirsutum
  Clone ID: LIB3083-017-Q1-L1-F6.pep
SQVGLASMIRQLLPKFDEKNSFD

SEQ ID NO: 110653 - protein, 37 aa, Gossypium hirsutum
  Clone ID: LIB3083-017-Q1-L1-F8.pep
VVLSELLLGLGLVRWLMGEANELGWVEFKLVAFRPVC

SEQ ID NO: 110654 - protein, 72 aa, Gossypium hirsutum
  Clone ID: LIB3083-017-Q1-L1-G11.pep
TNAPTYTSKQDINESFSFSSYIKHVKIHLNNQRTLVAYVTFKDPHGAKTYFLLSHATNVQQSYTIHLTPNYN

SEQ ID NO: 110655 - protein, 56 aa, Gossypium hirsutum
  Clone ID: LIB3083-017-Q1-L1-G12.pep
AMDLMKDSIFMRILLRYCSQKQYAINATLFHEQGSVMTMFLGVLLVLEMLRCISPI

SEQ ID NO: 110656 - protein, 92 aa, Gossypium hirsutum
  unsure (1)..(92): unsure at all Xaa locations
  Clone ID: LIB3083-017-Q1-L1-G8.pep
TLVLAEFSAVRAKASSVALRVLEKLPEEADSRLCFSQDRYMFHILRSDGLCFLCMANDNFXRRIPFSYLEDIHMRFMKNYGKVAHYAPAYAM

SEQ ID NO: 110657 - protein, 112 aa, Gossypium hirsutum
  Clone ID: LIB3083-017-Q1-L1-G9.pep
RHCKEAAAALASGTKYHIITGKTGEKQRRLWLDDAYEGRVKYIFQVQALTTGVNVPPWDTSVILRKIGSLTLLTQLLGRGMRQLKTYHKEVLGMHKTDHLCLDFSGTMFEMG

SEQ ID NO: 110658 - protein, 81 aa, Gossypium hirsutum
  Clone ID: LIB3083-017-Q1-L1-H11.pep
MNHIDILQQIYKLSPSFKKVHPELIHALIQLSKDFVCVNHFKYKYNRSFASYTFHLITLTSHLNMNLKAYKATPIVYHHFH

SEQ ID NO: 110659 - protein, 72 aa, Gossypium hirsutum
  Clone ID: LIB3083-017-Q1-L1-H12.pep
YRLFWSGIRKCVPESSLSDLIWCQMIGVCYIWRIVLKGKYCGIPVQTNIESVVRFSSYVCCRVRSQQYSTWD

SEQ ID NO: 110660 - protein, 108 aa, Gossypium hirsutum
  Clone ID: LIB3083-017-Q1-L1-H4.pep
FPPFLPVFDSLELEPNMEMKANLSLDLIADILSRLPVKHLLCLRCVSKLWRSLIGDPDFINLHLRHSLDSRTNHTLILKNTDLHTDDLAYLGPFAKLEHPLMSYNHGV

SEQ ID NO: 110661 - protein, 84 aa, Gossypium hirsutum
  Clone ID: LIB3083-017-Q1-L1-H6.pep
TRLSCYLTYISSHFLQKLSASNNKLTYNCYSHTFNYLINNVFTYCILALESTMQQVPIAFLERINEDITKIYRGLKASPAPAYI

SEQ ID NO: 110662 - protein, 52 aa, Gossypium hirsutum
  Clone ID: LIB3083-017-Q1-L1-H9.pep
LTTLVDEYQEFYDPLDKIYYIWVPTSHTTPQLLPTTLTLHVYFAIIHNLTLP

SEQ ID NO: 110663 - protein, 80 aa, Gossypium hirsutum
  unsure (1)..(80): unsure at all Xaa locations
  Clone ID: LIB3083-019-Q1-L1-A3.pep
LHQFLSSIRNDVTGNKETLMIXPDEQCPVHFLVAFTFDATVTGSMTVYLFAKEELNCNLTSVKEDLMNPDTVSFKEGLGQ

SEQ ID NO: 110664 - protein, 100 aa, Gossypium hirsutum
  Clone ID: LIB3083-019-Q1-L1-A9.pep
MLLGSHRHTTAMEAITEGVNNINISDSYKKNHIQVSNTKKPFFFYVNLAKRYMQQHNEVDLSALGMAIATVFTVAEIFKNNELAIEKKITTSTGDIKDDS

SEQ ID NO: 110665 - protein, 99 aa, Gossypium hirsutum
  Clone ID: LIB3083-019-Q1-L1-B1.pep
MSRGGSAGGGQSSLGYLFGSGEPPKPAVAPAASAPPVEKPSAAKTDAAKQVAAGVTSQTNNYHRADGQNTGNFLTDRPSTKVHAAPGGGSSLGYLFGGN

SEQ ID NO: 110666 - protein, 66 aa, Gossypium hirsutum
  unsure (1)..(66): unsure at all Xaa locations
  Clone ID: LIB3083-019-Q1-L1-B5.pep
DVLVQNLLQACVYKFANEWXMPCLMWDYVTDFVIXCPMNDMXYNKYCSNKVIHTLCVYLNKYYNCL

SEQ ID NO: 110667 - protein, 60 aa, Gossypium hirsutum
  Clone ID: LIB3083-019-Q1-L1-B6.pep
DVLFQNLFLAFLFNVANESGKPWLCWDYVTDYAIRCPIKENIYNKECSYKVIQSLVFYLI

SEQ ID NO: 110668 - protein, 46 aa, Gossypium hirsutum
  Clone ID: LIB3083-019-Q1-L1-C1.pep
YADAGAVSTDASLCASLCKDSATLLSDLAEGNMLCLIDSGSIIEYI

SEQ ID NO: 110669 - protein, 90 aa, Gossypium hirsutum
  Clone ID: LIB3083-019-Q1-L1-C2.pep
IRKQSNTVLRERGEERCIGAHGEGINILTMIVISQVELAVSKDVGIDDQVSVTVDNCNMTCVLAECEPADPQNVVLAAVSVIRTRGSTRE

SEQ ID NO: 110670 - protein, 77 aa, Gossypium hirsutum
  Clone ID: LIB3083-019-Q1-L1-D10.pep
RSRTSRVDATRPRTRGRTRFKTLSPQKPKPFAAARPVVGSLLSLFFFFSLSLSSSLLLGFSQLFDLGLKPSPIQIRI

SEQ ID NO: 110671 - protein, 100 aa, Gossypium hirsutum
  unsure (1)..(100): unsure at all Xaa locations
  Clone ID: LIB3083-019-Q1-L1-D2.pep
VLSEYLVTASLRVLXFGQISWQQVAXAMPTAMSHGFHGTRPDINCVIHGYRLMVCVTYSXANTCFMCDVASNQCEELPKYINADSKASXFLAIFFFEPIV

SEQ ID NO: 110672 - protein, 52 aa, Gossypium hirsutum
  Clone ID: LIB3083-019-Q1-L1-E1.pep
LFYYIKREFRLGLYIYLLIISIGELSVTVLFRYTVQQFMAYEFECGQQSSSN

SEQ ID NO: 110673 - protein, 95 aa, Gossypium hirsutum
  unsure (1)..(95): unsure at all Xaa locations
  Clone ID: LIB3083-019-Q1-L1-E12.pep
TXSEFPAGRHASGAFCPPQPLTEKKNQKTRNTANFLQLVGRRTTTTYSVRISGGPTIPTTTLLYLHGRTKNYPPPPKKNPKAARLGFSFVPFRVI

SEQ ID NO: 110674 - protein, 54 aa, Gossypium hirsutum
  Clone ID: LIB3083-019-Q1-L1-E2.pep
LYALDFLIINQLLYCFNLDYCPHSNPYTINCCPMYLNNTSNLKFIYTDYLYIYI

SEQ ID NO: 110675 - protein, 109 aa, Gossypium hirsutum
  Clone ID: LIB3083-019-Q1-L1-F10.pep
GTMFGAMKDFLIDCSFDLIEVLVAGLWFIVHKLKISLNSCGRCTFVELKDHDLCKVTGFLPEESIYILFISFDSSGDTLSKAEVGPTLTYTLSSLLHRTSGSTREFRTG

SEQ ID NO: 110676 - protein, 63 aa, Gossypium hirsutum
  Clone ID: LIB3083-019-Q1-L1-F3.pep
HHTSTRIFANYIYHKTILFNFNFLSLLNLYILIQTIYTHLQIQYHFYSIHNLLSSLIIILSLS

SEQ ID NO: 110677 - protein, 104 aa, Gossypium hirsutum
  Clone ID: LIB3083-019-Q1-L1-F4.pep
SYSYFAVFLSYIYRVYLSIYYYCKTILLNFNFLTLLNLYVVIQTCNAYLQMLCLFIAYHKFLASLIIILSLSETFCLNLLILSLYYPTTNLYYPNSYSLSAALI

SEQ ID NO: 110678 - protein, 48 aa, Gossypium hirsutum
  Clone ID: LIB3083-019-Q1-L1-G1.pep
FCYAIRHTIVEAMYLENPITLEYEMVEHECSRPTPADIQPDAWVDPGI

SEQ ID NO: 110679 - protein, 53 aa, Gossypium hirsutum
  Clone ID: LIB3083-019-Q1-L1-G2.pep
PCSTHASGSISAGFGLLHPYSTISNFKVIVVSIYISSTIVCPITYQNQYIYKN

SEQ ID NO: 110680 - protein, 48 aa, Gossypium hirsutum
  Clone ID: LIB3083-019-Q1-L1-G4.pep
CDFVNYIHSFNYFISNYITKSIHLQKLKHLKTHTILLFKFYLTLPILY

SEQ ID NO: 110681 - protein, 125 aa, Gossypium hirsutum
  unsure (1)..(125): unsure at all Xaa locations
  Clone ID: LIB3083-021-Q1-L1-C11.pep
KEAQHINKSLSAXGDVIASLAQKNTHVPYRNSKLTQLLQDSLGGQAKTLMFVHISPEPDALAETISTLKFAERVATVELGAAQVNKDTADVKQLKEQIASLKAALARKEGETEESRHSISHTDCS

SEQ ID NO: 110682 - protein, 130 aa, Gossypium hirsutum
  Clone ID: LIB3083-021-Q1-L1-E9.pep
KVKEILESNERGVIPKTPKGTRDFAKEQMTIRKKAFSIITKVFERHCATALDTPAFELKETLTGKYGEDSKLIYDLADQGGELCSLRYDLTVPFSRYVAMNGLTSFKRYHIDKVWRRDNPSKGRYREFYQ

SEQ ID NO: 110683 - protein, 45 aa, Gossypium hirsutum
  Clone ID: LIB3083-029-Q1-L1-A1.pep
WVKASGILGGPKNASPTIISPKQYKKRFRKAMTTYFLTVPDQWTL

SEQ ID NO: 110684 - protein, 72 aa, Gossypium hirsutum
  Clone ID: LIB3083-029-Q1-L1-A10.pep
TILISLNSLPPPYIPNKVIINPYNYIHTPIQFNRPTYLSFKTSSTLIIMSTTLFLLPHSLSYQYTTLVIIFI

SEQ ID NO: 110685 - protein, 47 aa, Gossypium hirsutum
  Clone ID: LIB3083-029-Q1-L1-A3.pep
KTQNSLIFIKTFTSLFLLELNRRYHAFSWPLNFILLESIIFLLLLES

SEQ ID NO: 110686 - protein, 48 aa, Gossypium hirsutum
  Clone ID: LIB3083-029-Q1-L1-A4.pep
PPIITIYSNKFTITTLIISHTHFPITIIFINYILLYTINLLHNHLTST

SEQ ID NO: 110687 - protein, 57 aa, Gossypium hirsutum
  Clone ID: LIB3083-029-Q1-L1-A5.pep
KKAKRGMVVRKNDIEIQREDECFLEKNMSVREKLSRSKFVRICFLKHPPRNRLPFSF

SEQ ID NO: 110688 - protein, 73 aa, Gossypium hirsutum
  Clone ID: LIB3083-029-Q1-L1-A8.pep
HPNISLTNHFYYSLYILQLPTLSNIKNSTSSNPFFNNFTYTLLPNKIQITSLQINHFLNFTLLFPTNHPNLLL

SEQ ID NO: 110689 - protein, 41 aa, Gossypium hirsutum
  Clone ID: LIB3083-029-Q1-L1-B10.pep
NLINPSSHKNILPTFLLFSHNISSKLKFLNLLYTKHNYSLT

SEQ ID NO: 110690 - protein, 36 aa, Gossypium hirsutum
  Clone ID: LIB3083-029-Q1-L1-B12.pep
VSLIVCLCFRKNKTNAVAFVLYCEFCRNVFQNKLCI

SEQ ID NO: 110691 - protein, 101 aa, Gossypium hirsutum
  Clone ID: LIB3083-029-Q1-L1-B4.pep
GRGFFKEGGDIFLIIYKDVGNEDSVFPIFYEFFFNSSPPICPSRLSHNIKFEHCCNSTHSFNSFCFLCNHSYVISPSSSILHDWTFTFITMFSIFSTNVVK

SEQ ID NO: 110692 - protein, 72 aa, Gossypium hirsutum
  Clone ID: LIB3083-029-Q1-L1-B5.pep
HFFKTKLSHLNYNPYTSIYMLHPSLIHHPHSIYTLQISIFSTLTNLLQSPSLKHTHTPNILFPSTLYQNNNI

SEQ ID NO: 110693 - protein, 66 aa, Gossypium hirsutum
  Clone ID: LIB3083-029-Q1-L1-B7.pep
PLPLIFPSLSLSHLPFLLYTLISLSFQTSLITSFPSNSIHLHFPSPYHNLPSHLLHQFSSPIIIIH

SEQ ID NO: 110694 - protein, 81 aa, Gossypium hirsutum
  unsure (1)..(81): unsure at all Xaa locations
  Clone ID: LIB3083-029-Q1-L1-C1.pep
EIEWEMVNDLRADMARFKKGMSKMQRMLEEXMDMQLKLQRSVRXKFXAVLNRSVGEKXLSVENWEEGYKWGNVRKGNCCVC

SEQ ID NO: 110695 - protein, 75 aa, Gossypium hirsutum
  unsure (1)..(75): unsure at all Xaa locations
  Clone ID: LIB3083-029-Q1-L1-C3.pep
NTFPTFFKHYKHXTKIVFFYSLADPQFXXFLLKNPKTLISSSLNIYLLYASASSTPTIFPTHNIHFSFQSFSXFK

SEQ ID NO: 110696 - protein, 87 aa, Gossypium hirsutum
  unsure (1)..(87): unsure at all Xaa locations
  Clone ID: LIB3083-029-Q1-L1-D1.pep
XPSYPXKFILHTNXFKQTRNFLKNRNPKNLSQIKIKIPLQKLLLILYPPTTSKYHLPHPLLQPSSPSTLHLYILLLPLPSNKLKISF

SEQ ID NO: 110697 - protein, 64 aa, Gossypium hirsutum
  unsure (1)..(64): unsure at all Xaa locations
  Clone ID: LIB3083-029-Q1-L1-D2.pep
TNIPPQTPPXFQYLSHLSTNSNTYPPTTPHIIPSSSTLYKSSSLLMILSLLHPNTLLSPFHLPT

SEQ ID NO: 110698 - protein, 47 aa, Gossypium hirsutum
  Clone ID: LIB3083-029-Q1-L1-D7.pep
NSNPIKNKNPLNIINNSINHTNHNIKNISINKISTSPNFNILIISIN

SEQ ID NO: 110699 - protein, 103 aa, Gossypium hirsutum
  Clone ID: LIB3083-029-Q1-L1-D9.pep
EGGFWVAIHSRRCKVLSWILSYSKLGNALIWVLPVDVITKAYSVMSKYLGSGLALRISEEGVVLETLELESGNKMSSISEVQEKDDQLWMGSIKMPFLGVYRL

SEQ ID NO: 110700 - protein, 83 aa, Gossypium hirsutum
  unsure (1)..(83): unsure at all Xaa locations
  Clone ID: LIB3083-029-Q1-L1-E1.pep
KIGXSFNIIXLYFXGNTRTRRAFSNHSRMPLMKTRYLFCFNSFTLCEETFIKHFSYIIHIFCYVYHEKNKIRAIDPIASSLIS

SEQ ID NO: 110701 - protein, 34 aa, Gossypium hirsutum
  unsure (1)..(34): unsure at all Xaa locations
  Clone ID: LIB3083-029-Q1-L1-E2.pep
KKIXXIIIIQIFSSHNNCSLFKHFFKTLLQPIQX

SEQ ID NO: 110702 - protein, 71 aa, Gossypium hirsutum
  Clone ID: LIB3083-029-Q1-L1-E9.pep
QHLLESYRHTLATQYIIIQHNYKIHISMCHTNPRLTFTPPSKKHLFLTSINNSCPYLTFHKVASNAFPFLP

SEQ ID NO: 110703 - protein, 74 aa, Gossypium hirsutum
  Clone ID: LIB3083-029-Q1-L1-F3.pep
KVPEFSSQNPIKTLLFSQKKCKSFNTYYKQILFLHGKAQNFGFPINVNNLPKHSRCRVHILKPISENLQRLNHL

SEQ ID NO: 110704 - protein, 63 aa, Gossypium hirsutum
  Clone ID: LIB3083-029-Q1-L1-G8.pep
RCYHSSSLFCSGKLRISIQGVSGSLCLLYVTQTSFSASFFFKKNYYAKLDLSFGEILLECIRI

SEQ ID NO: 110705 - protein, 70 aa, Gossypium hirsutum
  Clone ID: LIB3083-029-Q1-L1-G9.pep
FPPTLVFIGGFDPLQDWQRKYVEGLNKSGKHVYKIEYPNAFHGFYAFPQLPDTSLLMAEIKNFVLKQLDQ

SEQ ID NO: 110706 - protein, 50 aa, Gossypium hirsutum
  Clone ID: LIB3083-029-Q1-L1-H9.pep
QSLQKFFYQPTLVQKVSVLFFFAPLKHNTHHFPQNHIYIQGNTIHTGFNM

SEQ ID NO: 110707 - protein, 78 aa, Gossypium hirsutum
  Clone ID: LIB3083-049-Q1-L1-A1.pep
KLADSGRVSLAGSSVSAIVVFDISGTPLSKAASSYDSSSSSAPHKSVSNEIMGDGSQDVQSKVVALSVSDTVASGVWP

SEQ ID NO: 110708 - protein, 56 aa, Gossypium hirsutum
  Clone ID: LIB3083-049-Q1-L1-A7.pep
AHLYSNQNPNQFPIWEIPPNLLIRMKTLARNKLGIVGSNKIVSFTFSFFALELIKN

SEQ ID NO: 110709 - protein, 75 aa, Gossypium hirsutum
  Clone ID: LIB3083-049-Q1-L1-B4.pep
NPIRSNTNLIKHLNTSVKAVIIILYFGNILKHHVCQSHNLHSLNLWLFLLPALFILATCSNKLPSKQPLTASFDR

SEQ ID NO: 110710 - protein, 62 aa, Gossypium hirsutum
  Clone ID: LIB3083-049-Q1-L1-B7.pep
PEYLDIIHANLMLEDHELEELFVGQRFANKNECVDTIKRYGLKVSVDYRVADSKSTFYVGEC

SEQ ID NO: 110711 - protein, 76 aa, Gossypium hirsutum
  unsure (1)..(76): unsure at all Xaa locations
  Clone ID: LIB3083-049-Q1-L1-C12.pep
SIASSGTARSYNVYTRIEHSGILQNLSPSFEVQTIFTKMRCSYKCMQCDLIDHYDVSXGMQMRPHIVSICVPLSSK

SEQ ID NO: 110712 - protein, 133 aa, Gossypium hirsutum
  Clone ID: LIB3083-049-Q1-L1-C2.pep
QEALKAPIGSAAGDKFIVRDGLGEDKSQPPSDWDCLFGGSAWEPVGDGQWYLHLFDTSQPDFNWDNQEVRDDFIKTLRFWADKGVQGFRIDVAHGCVKDMSLPLPSQKEMKEQWDKKMENGAKANSHRLWDRD

SEQ ID NO: 110713 - protein, 46 aa, Gossypium hirsutum
  Clone ID: LIB3083-049-Q1-L1-D10.pep
SSSDRVEWVGSHVLKSASEVSKFTVGNYLAGKSWIPSAGVPFTSAL

SEQ ID NO: 110714 - protein, 35 aa, Gossypium hirsutum
  unsure (1)..(35): unsure at all Xaa locations
  Clone ID: LIB3083-049-Q1-L1-D11.pep
MRLLFSAQGSFXIDFNFRLICYFKLNHQGFHRFFL

SEQ ID NO: 110715 - protein, 105 aa, Gossypium hirsutum
  Clone ID: LIB3083-049-Q1-L1-D7.pep
LQNNIHKKKKMLFSGELSPIVNQSLNLLLSFLHVLSRGTGSNGCGECSIFRFRISSLCSYGKNISMGNSYWGWCPRYISILLLLHRFGRSGGCWRIRARFLLCVT

SEQ ID NO: 110716 - protein, 133 aa, Gossypium hirsutum
  Clone ID: LIB3083-049-Q1-L1-E12.pep
LTDSPLTAPENRGYTGEIMFETFNVPGLYIAVNSVLALAAGYTTSKCEMTGVVVDVGDGATHIVPVADGYVIGSSIKSIPIAGKDVTLFIQQLMRERGEKIPPEDSFEAARKVKEMYCYTCSDVVKEFNKHDK

SEQ ID NO: 110717 - protein, 107 aa, Gossypium hirsutum
  unsure (1)..(107): unsure at all Xaa locations
  Clone ID: LIB3083-049-Q1-L1-F1.pep
MEGGIILMSSSSLLILSSSLSYGQFAMSTNPTPSPSPSPAPTPPFTNIIYLLSXAGPYHKFLRYLYSYXLFNSFQIQANITTEGITILAPKDSAFKALTKPSLSNLT

SEQ ID NO: 110718 - protein, 112 aa, Gossypium hirsutum
  unsure (1)..(112): unsure at all Xaa locations
  Clone ID: LIB3083-049-Q1-L1-G4.pep
KKQLYSCDGADLWGIAXLVGGIIFILGYCTTIILSGHINPAVTFGLFSAPKVSFIKPVTYMASQCLGAICVIGLVKAFMKHPYNSLYGCTNTVAFGYNNGTALGADIIGTFV

SEQ ID NO: 110719 - protein, 68 aa, Gossypium hirsutum
  Clone ID: LIB3083-049-Q1-L1-H3.pep
PHESSFFFFFFYFFWEGFLRGGAAPLTIISFSAFTITRSIIISFSSYLKTPHKLFSSNFSYLTPLISF

SEQ ID NO: 110720 - protein, 122 aa, Gossypium hirsutum
  Clone ID: LIB3083-049-Q1-L1-H8.pep
SKASVADDAYGFSVEANSGYGWQENGHEGQYSVDKRYFTEDEQLNVQSQENALRMKANDVKSIRPSSDVVNEELKEVGFAVDVHHMPGSSRSKSSNKRKDSKVYPKDTRNVILDNKVQQLEN

SEQ ID NO: 110721 - protein, 46 aa, Gossypium hirsutum
  Clone ID: LIB3083-049-Q1-L1-H9.pep
FHVLLIKYKLIFFFWFAAFGKRVFLVSNQIVKLHELLCPFCNPPFL

SEQ ID NO: 110722 - protein, 127 aa, Gossypium hirsutum
  Clone ID: LIB3083-054-Q1-L1-A4.pep
RLKALLTEATVLVQPESGKEFVVYSDTLLNRLGCVLMQEGKVVAYASRQLKPHEKNYPTHDLELAAIVFALNIWRHYQFGEKCHVFFDHKSLKYLMTQKDLNLRQRRWLELLKDYELVIDYHLGKEN

SEQ ID NO: 110723 - protein, 63 aa, Gossypium hirsutum
  Clone ID: LIB3083-054-Q1-L1-A5.pep
SDSVGFCASGTRFIWIRVNKACCYSDLTQRPLASGRGYGCSSPETSIVEKRHRTMAFHGLEFT

SEQ ID NO: 110724 - protein, 74 aa, Gossypium hirsutum
  Clone ID: LIB3083-054-Q1-L1-A6.pep
LQSLVLTLYIAILIFFSFMVASDVQWYVKSKGVRLSQPNIMCQLYHAHDLRCVVSIFFPSLFSSVIIRRQSIKI

SEQ ID NO: 110725 - protein, 77 aa, Gossypium hirsutum
  Clone ID: LIB3083-054-Q1-L1-B5.pep
VIKPNGTGMAASKALVVYNNSTTGDAGLHTFDIRTHSLTVPEELSPEASDQTADTENDGSLAIFASPMVQDTLTANG

SEQ ID NO: 110726 - protein, 72 aa, Gossypium hirsutum
  Clone ID: LIB3083-054-Q1-L1-B7.pep
NYRERVQLIPILALDQGAYSFNILFLSFWLSLPWKWLLLIDSTGENTLNGQASLISQEWGMKELLLSTHSCH

SEQ ID NO: 110727 - protein, 122 aa, Gossypium hirsutum
  unsure (1)..(122): unsure at all Xaa locations
  Clone ID: LIB3083-054-Q1-L1-C2.pep
QQPTSLGSQLYPVAAGPTYPAPPGAGSFAPVPSQMGAASGPRMPQVVAPAPAPRGFMPVTNTSVQRPGMGPMQPPSTTQSAPVQPAAAPAAPPPTVQTADTSNVPAHQKPVITTLTRLXNET

SEQ ID NO: 110728 - protein, 119 aa, Gossypium hirsutum
  unsure (1)..(119): unsure at all Xaa locations
  Clone ID: LIB3083-054-Q1-L1-D2.pep
VGHMHGLPQIVESCNRPEXADPQPSRCDRAVTNEGGSLRRALSRALDEANAQALCTHVGGILHAQIXRCIXRLEISTTEAKDRLYRDVTHIIGCIRSLPYDNSNSCGTPNWQQLDEVLS

SEQ ID NO: 110729 - protein, 78 aa, Gossypium hirsutum
  unsure (1)..(78): unsure at all Xaa locations
  Clone ID: LIB3083-054-Q1-L1-E7.pep
MISWGVNCGCGSGCKCRSGCTSCEMYPEMNFAELTTTCTLGLGVAPLKVHCDGAKLETGADNVCKCXDNCTCNPCNCK

SEQ ID NO: 110730 - protein, 55 aa, Gossypium hirsutum
  Clone ID: LIB3083-054-Q1-L1-F5.pep
YCCYGFHQDVFLKQRIADHYTVNDCGIKVRFLPSNFSVKQYVCNIMLGLSVSIMS

SEQ ID NO: 110731 - protein, 79 aa, Gossypium hirsutum
  Clone ID: LIB3083-054-Q1-L1-G2.pep
GTMTQFCPRMARHNFRHRVQRRVLVLRRCFCCFWDRLLICSPGKPIRYRMLSRAPTPAVPSAAADGSIIASSKNLMPFP

SEQ ID NO: 110732 - protein, 50 aa, Gossypium hirsutum
  Clone ID: LIB3083-054-Q1-L1-G6.pep
RLLSFIRTIWPGTGQQWTTNNTFSEVTTPSYIETTHDKAFQPAKTYNWWT

SEQ ID NO: 110733 - protein, 86 aa, Gossypium hirsutum
  Clone ID: LIB3083-054-Q1-L1-H2.pep
LHSCVRISIEYSQRTVWNNRNDPQAYFPSTGTTEASVLAKPSFAHVNVVAQNGVIVSTRVCVFTGNFPGLRFLLRSPPPACSARSV

SEQ ID NO: 110734 - protein, 85 aa, Gossypium hirsutum
  Clone ID: LIB3083-054-Q1-L1-H7.pep
LCTHTQDDSVACSYRNYIKEKRRLSGMLTCRIHLFVLPTSSITAMLTNRRGKWLFRETFIIDMHHPGTTHRGSCHAFQPMLKLTM

SEQ ID NO: 110735 - protein, 94 aa, Gossypium hirsutum
  unsure (1)..(94): unsure at all Xaa locations
  Clone ID: LIB3083-054-Q1-L1-H8.pep
LLLGQSVRHVEYERAGXSYKGNGNIACXSKLEEDVLINDHTSVWGSWRKVRQWGYKXCMHTVRNRYCSVADGIEAAESGTDLTNANIAREATSE

SEQ ID NO: 110736 - protein, 62 aa, Gossypium hirsutum
  Clone ID: LIB3083-057-Q1-L1-D4.pep
RGTSYQLQADSLETVNYHCRLKTFMHYTYADYKRNISCNYDLVYTCCMTFKTSLTLNGPMTS

SEQ ID NO: 110737 - protein, 78 aa, Gossypium hirsutum
  unsure (1)..(78): unsure at all Xaa locations
  Clone ID: LIB3083-057-Q1-L1-F6.pep
DTLGVYSNLAGTYDAMERLNDAIEILDYVVDIREEKLGSVNPDVIDEKXKVRXLLKEAGRVWSRKLRSLVTLLTSALR

SEQ ID NO: 110738 - protein, 155 aa, Gossypium hirsutum
  unsure (1)..(155): unsure at all Xaa locations
  Clone ID: LIB3083-057-Q1-L1-F8.pep
YFIARRSLPPLNEVGRTCFRELVYQELNAKVRDAVISLIDQEREGEQIDRALLKNVLDIFVEIGMGQMDYYENDFEATMLKATAAYYSRKASNWILDDSCPDYMLKAEECLKREKDRVSHYMHSSSEPKLLEKXQHELLAGCATRLLDKEHSGCH

SEQ ID NO: 110739 - protein, 99 aa, Gossypium hirsutum
  Clone ID: LIB3083-057-Q1-L1-H4.pep
LRVLLKAVQIDTTQPPYVFKCHLYHLTGVPTEKQKIIVKGALMKDYSYCSTLGLKHIQKLIIMVTSYDALKSPQNSPAFIEYLSQQQHIVSIPHNAILF

SEQ ID NO: 110740 - protein, 63 aa, Gossypium hirsutum
  unsure (1)..(63): unsure at all Xaa locations
  Clone ID: LIB3083-058-Q1-L1-B11.pep
FTDSGLSVNASVPGTLRVATTLHPRNAEESVTHAYFADCLELQPELKMLKLFXNNSHTDTYYF

SEQ ID NO: 110741 - protein, 101 aa, Gossypium hirsutum
  unsure (1)..(101): unsure at all Xaa locations
  Clone ID: LIB3083-058-Q1-L1-B4.pep
FLHLPNNFNNPNPLPXIKRIIFKDVIGNNIKVAGLLKGIEXDSFRHICLLNITLDVTTKSPWNCSNIXGYSTLVSPETCEPLKESIYPKHYSDCYLLPNHL

SEQ ID NO: 110742 - protein, 29 aa, Gossypium hirsutum
  Clone ID: LIB3083-058-Q1-L1-C11.pep
LIQSMRIIQSANRLNQFLRLKIGRVIPQL

SEQ ID NO: 110743 - protein, 110 aa, Gossypium hirsutum
  unsure (1)..(110): unsure at all Xaa locations
  Clone ID: LIB3083-058-Q1-L1-D10.pep
KISPFLCPICNISYTLYPKQTNVTSATSNPSFPATKAQQYGSTLPVYRPQPKRHHYRLSFXSCCLKTTINILFLILITPVTSSIFYVLYLPHLPTFTVSSLKISALNLTL

SEQ ID NO: 110744 - protein, 80 aa, Gossypium hirsutum
  unsure (1)..(80): unsure at all Xaa locations
  Clone ID: LIB3083-058-Q1-L1-E4.pep
DWGIKHQKFVALWNDXLRRKPQMDPATDLQPSLEYIRWYSSCGKPYLLGGQSTIIPRHVQQLEGPMDPDPVVMYVAQSGE

SEQ ID NO: 110745 - protein, 125 aa, Gossypium hirsutum
  Clone ID: LIB3083-058-Q1-L1-E5.pep
YGIRLKKYVFTVKGSDSRAAFLASEASHQDSSGYQRRPRRARTEFRIRENSEKKHSSGMVSSDHPNQVLPNSSTNGRCTGFSARNRMRKVVVNKSKQTIEFECSNSAPSSSQEIDSGNRNEKGLG

SEQ ID NO: 110746 - protein, 85 aa, Gossypium hirsutum
  unsure (1)..(85): unsure at all Xaa locations
  Clone ID: LIB3083-058-Q1-L1-F10.pep
FTSIFFPFRANFQTLRHKAVSYCTQTTYXINQITNPIKINTTSRVKSILSLSNNYCTMKEYDTERFQLLKPSPFPLPSKSYITHP

SEQ ID NO: 110747 - protein, 92 aa, Gossypium hirsutum
  unsure (1)..(92): unsure at all Xaa locations
  Clone ID: LIB3083-058-Q1-L1-G12.pep
KHNSKMVDPPIANANRSLLHXSMEQPPVEPFILTRFLAEAESYMIPLTLAKNKTELVDEETLFAXNNTLRISYYEPVFFIDETKNRLDSXAF

SEQ ID NO: 110748 - protein, 113 aa, Gossypium hirsutum
  Clone ID: LIB3083-058-Q1-L1-H11.pep
DFFRYVWKLEPGFERNGMVYLAAIGSSHPYVIRLRQDEVRKTDLIGYSASSRADVDALFAQVQGSGAKIISEPAELDGPAGGYGFRAFDPDGHAFEVVTGSAQRTVGDLPPAL

SEQ ID NO: 110749 - protein, 123 aa, Gossypium hirsutum
  Clone ID: LIB3083-061-Q1-L1-A2.pep
MQPSLIFRPLQTYLRWFLSVHVPHINSYIPSLHDASLDHQRLLERLHVYGLYEVKVSGDGNCQFRALSDQMYRSPEYHKHVRKDIVKQLKDNRNLYEGYVPMKYKRYCKKMAKSGEWGDHVTL

SEQ ID NO: 110750 - protein, 120 aa, Gossypium hirsutum
  Clone ID: LIB3083-061-Q1-L1-A3.pep
CLWYDLGLPRHDRTLETGQTSLLPKKGRQAAWKPPRWRQDSPNGAYCRTKGLDRSMWTCVGEDEGEGEGYTIGLKGRLVVAEVSSQNRKGDTTSWCLHSYMGFISIHILVKLHRSYPFSA

SEQ ID NO: 110751 - protein, 117 aa, Gossypium hirsutum
  unsure (1)..(117): unsure at all Xaa locations
  Clone ID: LIB3083-061-Q1-L1-C1.pep
IKNLLNFVELPPXEVIFRRLFLFAFMGGWSIMNSSEGGPAFQVAVSLAACIYFLNEKTKSLGRAFVIGLGALATGWICDSIFVPMIPTVLIHPTWTLGIVTSLVAYAFLVLACTFLK

SEQ ID NO: 110752 - protein, 59 aa, Gossypium hirsutum
  Clone ID: LIB3083-061-Q1-L1-C5.pep
YQNMKNINHGPYFKTTAKFTIRTRLYVLYFFFSKAPLNSSMVSIHNNIQQLCNSLNLLN

SEQ ID NO: 110753 - protein, 44 aa, Gossypium hirsutum
  Clone ID: LIB3083-061-Q1-L1-D2.pep
ELHSSRKPNAKSLTWESRNHISTKQQSFGRIKDQMNDRMLVEWR

SEQ ID NO: 110754 - protein, 69 aa, Gossypium hirsutum
  Clone ID: LIB3083-061-Q1-L1-D6.pep
NILLCKVSINKHRYVPKKLCSLLRAMRSFYSNVASPYSSRHVTNYRFYKKCQLITRTFIYSRHLITQQF

SEQ ID NO: 110755 - protein, 42 aa, Gossypium hirsutum
  Clone ID: LIB3083-061-Q1-L1-D7.pep
LVKFGYGVEKVRVVIEGKIKFLKKVIGFIVFGKCFVKNGCIN

SEQ ID NO: 110756 - protein, 120 aa, Gossypium hirsutum
  unsure (1)..(120): unsure at all Xaa locations
  Clone ID: LIB3083-061-Q1-L1-E2.pep
FRLRSQVENLTRRAQLQEVELEKTTKQLKEAIAIADEETAKCKAAKEVIKSLTAQLKDMAERLPMGAARSIKSPSFTSFGSNPCXGDVSSGSIDRLNGQLVGQEQDSNVLNSQLLSNGSS

SEQ ID NO: 110757 - protein, 54 aa, Gossypium hirsutum
  Clone ID: LIB3083-061-Q1-L1-E3.pep
QENHNSMICIQRPFRLKIYRLTFHVYVLYYMQLYNTVSDTTYLEIHTIQITKIL

SEQ ID NO: 110758 - protein, 133 aa, Gossypium hirsutum
  unsure (1)..(133): unsure at all Xaa locations
  Clone ID: LIB3083-061-Q1-L1-E4.pep
MIGGRKDATRAGLIESWLGKTTKQLIEAIAIADEETAKCISTRVEVXSLSDQIKDIDERSPMKTAPNDTEPTSASFSQCHIHGQXHSVSIDRLIGQLACQEQDSNALNSQMLSNGSSIASTRSSGHNRQNHIE

SEQ ID NO: 110759 - protein, 140 aa, Gossypium hirsutum
  Clone ID: LIB3083-061-Q1-L1-F1.pep
PNEYIRGVTLRFGCGLNETEIIEPLIPSVLQNLEHRHPFIRRNAILAVMSIYKLPQGEQLLVDAPEMIEKVLSTEQDASAKRNAFLMLFTCAQDRAVNYLLTHVDRVSEWGELLQMVVLELIRKVCRTNRAEKGKYIKII

SEQ ID NO: 110760 - protein, 66 aa, Gossypium hirsutum
  Clone ID: LIB3083-061-Q1-L1-F6.pep
LREQALLVLLSFSLTFYLLFFPFSVDYPHLPFINPAFQLSSLIFFSSWQRQKCWKLKKEPFPVPLL

SEQ ID NO: 110761 - protein, 50 aa, Gossypium hirsutum
  Clone ID: LIB3083-061-Q1-L1-F7.pep
SSCTNLAQTLRIFKLLLSKLIRFHQHAFKLNNTLFKSLAKHCIKGFNHME

SEQ ID NO: 110762 - protein, 125 aa, Gossypium hirsutum
  Clone ID: LIB3083-061-Q1-L1-F8.pep
EALAKRNSELQASRSLCAKTSSKLQSLEAQLARSPSKAEVYSSQNASTPPSVTSVSEDGNDDDRSCAESWATALVSELSQFKKEKGTDTPNKNQNSKHLDLMDDFLEMEKFACSSNDSTTNGAIN

SEQ ID NO: 110763 - protein, 52 aa, Gossypium hirsutum
  Clone ID: LIB3083-061-Q1-L1-G6.pep
FPINLSSTTFTELPKHLLTKEILTAQLTLIATFLIYSALPKHHMYSTLISKT

SEQ ID NO: 110764 - protein, 52 aa, Gossypium hirsutum
  Clone ID: LIB3083-061-Q1-L1-H2.pep
YPSGEMEYEKISGWKSFVVKLKMLIAFPWQKVRKGSVLTMKLRGQISDQLKS

SEQ ID NO: 110765 - protein, 41 aa, Gossypium hirsutum
  Clone ID: LIB3083-061-Q1-L1-H3.pep
TLSNGIPLSKTTTIRALNIYMTIASTHTNLKNPLRTIQTNS

SEQ ID NO: 110766 - protein, 62 aa, Gossypium hirsutum
  unsure (1)..(62): unsure at all Xaa locations
  Clone ID: LIB3083-061-Q1-L1-H8.pep
SCRLFLFLILGLWFFLSESTSLLPLPPDLFFAFASAIFFLHYSVSDGAXXVQTSDLQAKCDS

SEQ ID NO: 110767 - protein, 111 aa, Gossypium hirsutum
  unsure (1)..(111): unsure at all Xaa locations
  Clone ID: LIB3083-062-Q1-L1-A3.pep
SRAIGCLHVTDTLCWELMSQHEETVLCKSTVSKNCYDSSTPDSGPPICSTXQYVESPYYRPLQNCIGRTHSRRWLAIEERPTWPSRSNLYXNELSLYGLHSQELNEDTTYS

SEQ ID NO: 110768 - protein, 152 aa, Gossypium hirsutum
  unsure (1)..(152): unsure at all Xaa locations
  Clone ID: LIB3083-062-Q1-L1-A6.pep
QTLHPAFQPGWDLEDXRLSLFKCTRWQVEETLDPINCPFHYFCDSVYPGHYPQVVDILVLLLATASYLATLVIMLIDISRRGRPCLSQSKRLFLPSGPLSLPLILLALAKGLRINILYPFSCIAPAILQLVQISSLAFDNGVDKDPXYAFLE

SEQ ID NO: 110769 - protein, 70 aa, Gossypium hirsutum
  Clone ID: LIB3083-062-Q1-L1-B1.pep
PPLVQPRRFDIGAPNGPVPIGTNEGFGCGLNQARVLSFLFYYFTYVYNNEEQIGENKNQKPTKTTLRFTL

SEQ ID NO: 110770 - protein, 33 aa, Gossypium hirsutum
  Clone ID: LIB3083-062-Q1-L1-B7.pep
VSSSLCLSFYHSLQDRIQNLSATFSKAISNYRR

SEQ ID NO: 110771 - protein, 55 aa, Gossypium hirsutum
  Clone ID: LIB3083-062-Q1-L1-C5.pep
ALMDNCGFRGAERVGCGAILKKAFHPTACINFSVNHECLLHPLGLSQQLSYFLPR

SEQ ID NO: 110772 - protein, 103 aa, Gossypium hirsutum
  unsure (1)..(103): unsure at all Xaa locations
  Clone ID: LIB3083-062-Q1-L1-D4.pep
WLNHTQNPGDVNSRTKSDGPSNEAXEPVFLDDIASSVDEGPGKEDELLDDCGILPSNCLPCLASTVPSIEKRSLSSSPPSARKKPALKLSFKWKEENANATLL

SEQ ID NO: 110773 - protein, 96 aa, Gossypium hirsutum
  unsure (1)..(96): unsure at all Xaa locations
  Clone ID: LIB3083-062-Q1-L1-E8.pep
IGSTDTTKNKVQLWEKAIVHFSLCHVMELFTGFAPTGEDSITSSLADATHNXSHISQPAVNQSVTPTVHINYVNRCLRALTSGSVPIPGNSNELKN

SEQ ID NO: 110774 - protein, 64 aa, Gossypium hirsutum
  Clone ID: LIB3083-062-Q1-L1-F4.pep
KHNAYLQKELEIYPTNVHNHDTKYRMIMLRTMKDDIILSASSASCSNAEDTQLLSFDFNHQSYE

SEQ ID NO: 110775 - protein, 140 aa, Gossypium hirsutum
  Clone ID: LIB3083-062-Q1-L1-F7.pep
PTSMIVRCLILHRHRVMRRVIATRVLVILRRVRRRCGVGVRVGVVHRLRLSGGMWRVLRLRGVDLPDGVPPSIVHVGATEIPNFRPSLEYQREIKIEKSSSKYIYGEDFYIKIESNFMKKIYGFRSFFLKNKQKIKKIKN

SEQ ID NO: 110776 - protein, 129 aa, Gossypium hirsutum
  unsure (1)..(129): unsure at all Xaa locations
  Clone ID: LIB3083-062-Q1-L1-G2.pep
MSNSLIETPPEGVFISDLSRRYHMLSKKCVHPPSFHKTLTTIDPLILQLSVTFEAYTISTERPIVCDTNCETLHYMVPNIYXMXAITTSDTKAVXTDMTISQIHLHQYHTDRDSIVVTAFTLLTRHLFN

SEQ ID NO: 110777 - protein, 140 aa, Gossypium hirsutum
  unsure (1)..(140): unsure at all Xaa locations
  Clone ID: LIB3083-062-Q1-L1-G6.pep
TCRDKIGSFDGIKVLLEQQDRDGVDKLGTRLLLATLSKIYGSLQTAYGGQIVGVIVFNGVPQPESKTLMNVIYTSRSSPRWLADTKSSANTTLAAHVLVRTTLAWITGVXLLIATLLGVYFLLNMPLTRDTLLYSNVKLD

SEQ ID NO: 110778 - protein, 52 aa, Gossypium hirsutum
  Clone ID: LIB3083-062-Q1-L1-H1.pep
LHVQVTQNCFNCNVINAFQLLGIQKLEYPSNQCSFKHCFQFSLHILFQKGVK

SEQ ID NO: 110779 - protein, 100 aa, Gossypium hirsutum
  unsure (1)..(100): unsure at all Xaa locations
  Clone ID: LIB3083-062-Q1-L1-H3.pep
MSNTNISETVPFLPEMYDNNDEYGRWWKNVLDLEEAKKQVLFSLPMIVTNVVYYSITLVSVMFAGHLGELQLAGATLANSWATVTGFAFXGLSGALETLC

SEQ ID NO: 110780 - protein, 82 aa, Gossypium hirsutum
  Clone ID: LIB3083-062-Q1-L1-H6.pep
MKRLLCWVLVDPLQKHGFCSRADFSKEPAFSWMNTLSEEVKRAIKRSRILFCNGYDFDELSPHMIISAWEYAVEVCTSVFFD

SEQ ID NO: 110781 - protein, 60 aa, Gossypium hirsutum
  Clone ID: LIB3083-062-Q1-L1-H7.pep
RHEVCRPSMSEVLELLMTGHDSDVAKSWRMPKFASDELDDYSMVFGYEVPTGISLEEFLC

SEQ ID NO: 110782 - protein, 140 aa, Gossypium hirsutum
  unsure (1)..(140): unsure at all Xaa locations
  Clone ID: LIB3083-064-Q1-L1-E12.pep
GHLEIVKSLLSXRPGSATRIDKKGQTALHMAVKGHNVEVADVLLKSDPSLINMVDAKGNTTLHIGSQKGRLQIAEKLLNDSGLNKLVINKSRQTALDSAXNNKLSDIASYLKEHGIQSAKSIKPHPANSARELIQTVSDI

SEQ ID NO: 110783 - protein, 110 aa, Gossypium hirsutum
  Clone ID: LIB3083-068-Q1-L1-A3.pep
LCIVLFFILWFPLIILSSGLPGSSPNPVINVDLTLGVVGWDPLYHINQDYGGSLVNSSTCSALRRNAFVTSDDSSNTQILVMPNASESTWNIAPPSRISLINSVIPCLTP

SEQ ID NO: 110784 - protein, 116 aa, Gossypium hirsutum
  Clone ID: LIB3083-068-Q1-L1-A4.pep
MAIEVLADISSPRISFSDDLDQEDGVDSIEECHHQRLDTSLLNPTSDFDFGFVNNSFVQELPSADELFSNGKIRPIEIKDKAVVANRVRRQLQPVAVVRSSPPQINTDYPEKKRLK

SEQ ID NO: 110785 - protein, 59 aa, Gossypium hirsutum
  Clone ID: LIB3083-068-Q1-L1-B5.pep
NTRPFPEQTDFFLWETHNLKKPILSLYRHNTSVPHRSCPGPIYLLAFKPFKIRAERNLE

SEQ ID NO: 110786 - protein, 82 aa, Gossypium hirsutum
  Clone ID: LIB3083-068-Q1-L1-B6.pep
FCFCLKTDFIITIIVIIIVTQFCPKMVKLNLRRRFQRHVLILRRCIRCFWDRFLMCSLGKPINTRYRMLYCTSFFVHSPAFA

SEQ ID NO: 110787 - protein, 63 aa, Gossypium hirsutum
  Clone ID: LIB3083-068-Q1-L1-B7.pep
FFFLFFLFFFFIIFFFFYFYVFFFLFLFIFVFLFFYTFIFFFFLFFYFFIFSFFIFFLIFFLF

SEQ ID NO: 110788 - protein, 58 aa, Gossypium hirsutum
  Clone ID: LIB3083-068-Q1-L1-C2.pep
LICFIWLALGIGHGRKPKRAYPPTVFYYLPLCITASGISYNSLPTFVYTLPATWFVCL

SEQ ID NO: 110789 - protein, 45 aa, Gossypium hirsutum
  Clone ID: LIB3083-068-Q1-L1-D6.pep
THLQRVLGRTWAALMALLFDMAAKPDYGSHACKRINVCRNKERVF

SEQ ID NO: 110790 - protein, 66 aa, Gossypium hirsutum
  Clone ID: LIB3083-068-Q1-L1-D8.pep
INSNPDSFNSLINKIYGVFSNSAPDFRSRFRLPGLPKWSWFEALFECCKASRVPCFLGTKRGGVFA

SEQ ID NO: 110791 - protein, 59 aa, Gossypium hirsutum
  Clone ID: LIB3083-068-Q1-L1-E1.pep
PASWIHVQDNISDIKKDQNIPSKDLSRQTRVYQKAFSAKVEPKSHNFFIPTSTISTQRT

SEQ ID NO: 110792 - protein, 44 aa, Gossypium hirsutum
  Clone ID: LIB3083-068-Q1-L1-E6.pep
EFRVISLFFLRSSNSCYGFDILGAHPYPKLSIIFLQASVSYISL

SEQ ID NO: 110793 - protein, 58 aa, Gossypium hirsutum
  Clone ID: LIB3083-068-Q1-L1-E7.pep
QDYVIVKLSDVRKEVQCPICLGIIRKTRTVMECLHRFCRECIDKSMRMGNNECPACRT

SEQ ID NO: 110794 - protein, 95 aa, Gossypium hirsutum
  Clone ID: LIB3083-068-Q1-L1-E8.pep
AGGLYDFIVEHDVKELGAHTLVCTALYNDNDGERKYLPQFFKFVVANPLSVRTKETTYLEACIENHTISNLYMDQVEFEPAPHWSATVLKADELH

SEQ ID NO: 110795 - protein, 49 aa, Gossypium hirsutum
  Clone ID: LIB3083-068-Q1-L1-F2.pep
LINGSRYYFYRQKYIRSAEHKNKMVTVVSLMMNKRKKYCYAHNLVISPL

SEQ ID NO: 110796 - protein, 126 aa, Gossypium hirsutum
  Clone ID: LIB3083-068-Q1-L1-F7.pep
RERERESRSLGGHMRSHMNNIIINNNNSVETDEKLCKKKLVTLNNVGHDSNTDETGVDGGYILRENPKKTWRLTDLSEDSSVHDKVCKECGKGFQSWKALFGHMKCHSDKEKSPVNSLEEQDSWSH

SEQ ID NO: 110797 - protein, 72 aa, Gossypium hirsutum
  Clone ID: LIB3083-068-Q1-L1-G5.pep
VVRKEWTAEVFDIELMKYNDIEEELVQMLQIAMACVARLPDVRPSMEEVTRTIEEIRSSDSENRPSSDQEVA

SEQ ID NO: 110798 - protein, 77 aa, Gossypium hirsutum
  unsure (1)..(77): unsure at all Xaa locations
  Clone ID: LIB3083-068-Q1-L1-G6.pep
MREILHVQVRQCVNQISSKIXEAVCDELSIDPSGRYMAYSDLQLXRVNVYSYTSSCVPSVPRTVLIYSKPVSTSKVR

SEQ ID NO: 110799 - protein, 131 aa, Gossypium hirsutum
  unsure (1)..(131): unsure at all Xaa locations
  Clone ID: LIB3083-068-Q1-L1-H3.pep
PLPISSNNQVSSSPSATTPPVPSLNQHHRAQGQPLVQENTSPVEKTTASTATVGTTTSAPTSTVETVQACIGRDRKEELRQQKRDEDGLHLLTXLLQCAEAVSANNFEDANRMLVELSQLSTPFGTFGQRV

SEQ ID NO: 110800 - protein, 71 aa, Gossypium hirsutum
  Clone ID: LIB3083-068-Q1-L1-H5.pep
KMAPTAHKGKIPLKLAEERRAQPSASLLLPLHLHLCPFNSVLLGGRASLVPPDGKFSFSSLIPPLFYIIAE

SEQ ID NO: 110801 - protein, 47 aa, Gossypium hirsutum
  Clone ID: LIB3083-069-Q1-L1-A10.pep
CALLIPRHGRFLTESAFFRGYMFTYDVDEQMIKCTQQDLILFNKWII

SEQ ID NO: 110802 - protein, 59 aa, Gossypium hirsutum
  Clone ID: LIB3083-069-Q1-L1-A5.pep
EYELLLLFLLFLLLFMLFPGIAVSLHARKAPSFGERDGAEGVTESEGVHFQHSPIVLIR

SEQ ID NO: 110803 - protein, 103 aa, Gossypium hirsutum
  unsure (1)..(103): unsure at all Xaa locations
  Clone ID: LIB3083-069-Q1-L1-A8.pep
MSLIPSFFGNRRSNNVFDPFSLDLWDPLKDFPVSXSPETSAFVDARIDWRETPEAHVFKADVPGLKKEEVKVQVEDDRVLQISGERNVEKEDKNDTWHRLERS

SEQ ID NO: 110804 - protein, 70 aa, Gossypium hirsutum
  Clone ID: LIB3083-069-Q1-L1-B5.pep
FHGAGLSVAPKICPSEIAVARKMSEEAKDTYAQALYKSVTEQYNVLKCAIHGKQGFAASSIGISLSQPWN

SEQ ID NO: 110805 - protein, 55 aa, Gossypium hirsutum
  Clone ID: LIB3083-069-Q1-L1-B8.pep
SFSTSQHISYILRIRELGFLCWKKMVGSIDTLHRSLNSNGSFYNFNGLEEKLDEL

SEQ ID NO: 110806 - protein, 113 aa, Gossypium hirsutum
  Clone ID: LIB3083-069-Q1-L1-C10.pep
FVFFFLLCLLDPVHTRLGSFHYWTYPVPFRIIPPVVFFYFGDYKKKGSKENRFVAYFSFFSSFVPRKENRVRSFLFRFDYWMEENDNQRRRTVPFTGIFDVVLACVLPVIQYA

SEQ ID NO: 110807 - protein, 97 aa, Gossypium hirsutum
  Clone ID: LIB3083-069-Q1-L1-C11.pep
YLLPDVKNAEVALFCACMGGIMYYLEYEPDTMAPFLRGLIRRFLASRISNPGPSVNQTTSYTYLQTPDAVKKPKIQENPEIETSTPKQYNLESIPGL

SEQ ID NO: 110808 - protein, 29 aa, Gossypium hirsutum
  Clone ID: LIB3083-069-Q1-L1-C5.pep
SIQHQQDESLNITDVVCELIQHEKITVTK

SEQ ID NO: 110809 - protein, 109 aa, Gossypium hirsutum
  Clone ID: LIB3083-069-Q1-L1-D11.pep
THAAAAIARLLHSRRVDYAITDCVNRAGSVLALVSFLESSRGGSAAIGEALDALAILSRSESASGQIKPTWAVLAEFPENISPIVSSIADATPLLQDKAIEILSRLCHD

SEQ ID NO: 110810 - protein, 114 aa, Gossypium hirsutum
  Clone ID: LIB3083-069-Q1-L1-D4.pep
RKAIEEAPPVIKETPVIVEDTEKVNSLAAEVENLKASLLSETKAAEEARNACTDAETRNAELVKKLEESERKVDQLQESVQRLEEKLANSESEIQVLRQQSLAISPTGKSLTAR

SEQ ID NO: 110811 - protein, 111 aa, Gossypium hirsutum
  Clone ID: LIB3083-069-Q1-L1-E10.pep
GIFSLSDACRTGAAEAVNELKSMGIKTAMLTGDNQAAAINVQEQLGNRLDVIHADLLPQDKARIVEEFKKEGPTAMIGDGINDAPALATADIGISMGISGSALATETGHVI

SEQ ID NO: 110812 - protein, 114 aa, Gossypium hirsutum
  Clone ID: LIB3083-069-Q1-L1-E2.pep
DDFTRAVGEVIKCLAENELIPGIRNELFPVTSSYGAPVFFSLERAAAPYFGIKAYGVHMNGYVEKDEQKFLWLGKRSLVKSTFPGMLDHLVAGGLPHGIACGENLIKECEEEAG

SEQ ID NO: 110813 - protein, 113 aa, Gossypium hirsutum
  Clone ID: LIB3083-069-Q1-L1-E4.pep
VSPAFLIQLATPTSVLVREMASGLVRIALECEKKMGKKGVKLLNEPVWRTYCNGKKCGFAMRRECGAEEWKVLKAVEPISMGAGVLPGNCNDNGAGSEGELMYMRAKFERVVG

SEQ ID NO: 110814 - protein, 50 aa, Gossypium hirsutum
  Clone ID: LIB3083-069-Q1-L1-E7.pep
NNLVQISTISEYDLGGEGDLFKAPEPIIEEPNLGLDPMTAAISLISCGED

SEQ ID NO: 110815 - protein, 91 aa, Gossypium hirsutum
  Clone ID: LIB3083-069-Q1-L1-E9.pep
REREEYITHLQDKAKEKERKREEEKAKKEKDREEKDKRKEKEKERKEKEREREREKGKDRTKKDETDRENLNISDSYGLKEEKKREREKDG

SEQ ID NO: 110816 - protein, 87 aa, Gossypium hirsutum
  Clone ID: LIB3083-069-Q1-L1-G12.pep
HITDEIQEWIERAAMIPVDGKEGPADVCVIELGGTIGDIESMPFIEALGQFSYRVGTGNFCLVHVSLVPVLSVVGELKTKPTQHSCW

SEQ ID NO: 110817 - protein, 63 aa, Gossypium hirsutum
  Clone ID: LIB3083-069-Q1-L1-H2.pep
EKHFVSAELKQDVNVSSKPKLSFNSYFASIYPIKKIEDLVTIRNTLLYLYPWIFSSYLFNWKY

SEQ ID NO: 110818 - protein, 49 aa, Gossypium hirsutum
  Clone ID: LIB3083-069-Q1-L1-H6.pep
SSGSARRVCTTRRHIILTFLCAALIYLWMSKYMCVTSVISKACSFNRIC

SEQ ID NO: 110819 - protein, 114 aa, Gossypium hirsutum
  Clone ID: LIB3083-069-Q1-L1-H9.pep
DFFRALDDRFVLLSGRKSSSSQDQDLTGAHGEKVLAGLVLVLAQLSVFIEQTAVPRITEEIAASFSGGGGRGYENGPAFVPGEICRIFRSAGEKLLLHYTKMRTQKVSTLLRKR

SEQ ID NO: 110820 - protein, 51 aa, Gossypium hirsutum
  Clone ID: LIB3083-070-Q1-L1-A2.pep
KEFGIRLNVCHTFKKAVLVLVLFSDLPASFWSYFLIIAVVFSLNLHVSWVL

SEQ ID NO: 110821 - protein, 93 aa, Gossypium hirsutum
  unsure (1)..(93): unsure at all Xaa locations
  Clone ID: LIB3083-070-Q1-L1-A6.pep
LLSALLCIAPARVSGQSAIYPSTFTPAPPTPPYSTLLHSSEAHAPPTCTHTVDCTCTTTXMTRTVTXSPPTISTPAPTDADAATSPPDFPATA

SEQ ID NO: 110822 - protein, 89 aa, Gossypium hirsutum
  unsure (1)..(89): unsure at all Xaa locations
  Clone ID: LIB3083-070-Q1-L1-B6.pep
CHACTLCDLFHFSSSSSYFISPSLDTIRSMFGIEIGNTDTVDFTFHSSRGFVFFLCRTLNHIMNTVKSQTTNETINSHCVIAAHFDCXF

SEQ ID NO: 110823 - protein, 103 aa, Gossypium hirsutum
  Clone ID: LIB3083-070-Q1-L1-B7.pep
ELVLRVRDEGAGAGNQLVEKHMGTVPKRDEGMVRLVAKTANALVEEKEKNKRSDDRKLNVQGIRDETRSSGNAMVQNIVGAVNARVEGIPRQVGSNNERRDEG

SEQ ID NO: 110824 - protein, 60 aa, Gossypium hirsutum
  Clone ID: LIB3083-070-Q1-L1-C8.pep
ARFRLHKSQQSWNFSNHSFSAGKQRYGLITQKDHHVLKNKLHKHRWYYQSGDHHNFHSHH

SEQ ID NO: 110825 - protein, 54 aa, Gossypium hirsutum
  Clone ID: LIB3083-070-Q1-L1-D2.pep
MIILAQKFYKGKLCYLTYPKQSQKYKEKCLKDKNRRKKLMIIDEPRVDEINQSK

SEQ ID NO: 110826 - protein, 132 aa, Gossypium hirsutum
  unsure (1)..(132): unsure at all Xaa locations
  Clone ID: LIB3083-070-Q1-L1-D7.pep
CFIFVNGRILKRKSMGEDLFWAIRGGGGGSFXLILSWKVKLVSVPSTVTVFTIRKTLXENATNLVHQWLSVAHKLPGDIFSAVTMRKVNRNGKPTILVAFNCFFLGDTNALIPLMKARFPELGLKKEHCTEM

SEQ ID NO: 110827 - protein, 67 aa, Gossypium hirsutum
  Clone ID: LIB3083-070-Q1-L1-D8.pep
KELGHITGDHSSREPSDFKKEAVTSGFDRVKRNLFPGYFCLLLHRSHMRTVLLDAQILFSIASFWLF

SEQ ID NO: 110828 - protein, 125 aa, Gossypium hirsutum
  Clone ID: LIB3083-070-Q1-L1-E8.pep
DKSITTFDPLASSTWEQVPPAKTLITPVQCKSLWRQFRAETEYSVTQAISAQEASRRNNNWMPPPWAIVALVVLGFNEFMTLLRNPLYLGVLFVGYLTVKALWVQLNISGEFQHGVLPGLLSIST

SEQ ID NO: 110829 - protein, 107 aa, Gossypium hirsutum
  Clone ID: LIB3083-070-Q1-L1-F1.pep
STNLMLFLFLVLTLYLVYPDTGSFWNMPEQRQGVGLPRAVPQSLRASSTSSPRAFSSVQSNQMPWFPFALPKSRRRGNLRLSNRKACRRYGDGSAFRGKVKVGQCEK

SEQ ID NO: 110830 - protein, 129 aa, Gossypium hirsutum
  unsure (1)..(129): unsure at all Xaa locations
  Clone ID: LIB3083-070-Q1-L1-F3.pep
NIRLWXDLKEFSGFKTKSGLVKAIIVLGGKVFTGHQDGKIRVWKVSSTTSPSVHKRLGSLPTFKDIIKSSVKPKNYVEVRRNRNVLRIKHFYAVSCMSVNEEVGLLYSGSWDKTLKVWRLADSKCLESI

SEQ ID NO: 110831 - protein, 81 aa, Gossypium hirsutum
  Clone ID: LIB3083-070-Q1-L1-F7.pep
LFFIPRRRNSKGKSESKLAELTNKHFAGSCIPKGLYSLFLGLTDEYFFNAHAHTQLAYAELHPVLANNVYHHYILSTDNIL

SEQ ID NO: 110832 - protein, 71 aa, Gossypium hirsutum
  Clone ID: LIB3083-070-Q1-L1-G5.pep
QIGHIGFEFKLFLDQQPPFTNRTKQKLSYKVFNTKLPFLQLVQNNQVTLNKLGFFKKGKKLFFDTWINQMK

SEQ ID NO: 110833 - protein, 68 aa, Gossypium hirsutum
  unsure (1)..(68): unsure at all Xaa locations
  Clone ID: LIB3083-070-Q1-L1-H4.pep
LIRLNENLMKQEKYNITCLWFIDYLDCIVKLLNRPLFPPHHNSSCYSRRNDLKASLFSLYFXKGRTGW

SEQ ID NO: 110834 - protein, 124 aa, Gossypium hirsutum
  Clone ID: LIB3083-070-Q1-L1-H6.pep
MARVDIAADGLVPRHSHRRASEVTICVQGVIIVGFVDTSTRLFTQKLEPGDSFVFPRGLIHFLYNMEPKKPALAICGLSSQNPGTQIASRAAFVSNPPIPEVVLEKAFQISHQHVAKIRKNHGG

SEQ ID NO: 110835 - protein, 113 aa, Gossypium hirsutum
  unsure (1)..(113): unsure at all Xaa locations
  Clone ID: LIB3083-070-Q1-L1-H7.pep
EKNTPFTGMMXSEYVFNQSLFDHLHIQKTEHLNCRMRVRIAIGIAYFFEHIHXVTVDIAHINLQACYEYLTEDYALNICDFSFLNNATAVNVGSATMGLLKCPSSYAKNNDYR

SEQ ID NO: 110836 - protein, 51 aa, Gossypium hirsutum
  Clone ID: LIB3083-075-Q1-L1-A10.pep
SYIIPAFARLAKNEAIADRENGGLLISKQRTSSSDGIVFYTGIFPGAHPAL

SEQ ID NO: 110837 - protein, 99 aa, Gossypium hirsutum
  unsure (1)..(99): unsure at all Xaa locations
  Clone ID: LIB3083-075-Q1-L1-A2.pep
HSQYQKLLVHVTNRPQVFPASSFHIPSGRTSLPPFFGTRLLFQFVDSTXXLLDSXKRFCAWPYHCVYHPHPIINCPGKNLVQKPHHTSKLFIFSPPSFT

SEQ ID NO: 110838 - protein, 94 aa, Gossypium hirsutum
  unsure (1)..(94): unsure at all Xaa locations
  Clone ID: LIB3083-075-Q1-L1-B10.pep
EALVERFIEEDQXITSFSLSRDNRFLLVNLLNQEIHLWSIEDDLKLVSKYRGHKRTRFIIRSCFGGLEQAFVASGSEDSLVYIWHRGTGELIEA

SEQ ID NO: 110839 - protein, 92 aa, Gossypium hirsutum
  Clone ID: LIB3083-075-Q1-L1-B2.pep
VLNSSLVHAAVQIFAMMNSSASPLGTPSLPAGCQVVKEYQHCMTRSMSCHSSTLSGSDHIQKSQSNSRSAFLETAVYYISSPPMPLRQQCTL

SEQ ID NO: 110840 - protein, 128 aa, Gossypium hirsutum
  Clone ID: LIB3083-075-Q1-L1-B3.pep
PVWLEVERTSFLSGDGQDILNSLNGHGKAEYSSDDSEAEFFGRLHSGASASSSASSVAVSETYNLTANSLQSSLAVGSFFKLRCEVLGANIVKSGSKTFAVYSISVTDVNNKHSWSIKRRFRHFEELH

SEQ ID NO: 110841 - protein, 78 aa, Gossypium hirsutum
  Clone ID: LIB3083-075-Q1-L1-C11.pep
KIRTFQLRLKQTKFQKELILVRTPKTMKQIPTTPITKPYIWSHFKSLTKHQFHTQQIIPTIYKLILFNYKTNYDNNNI

SEQ ID NO: 110842 - protein, 39 aa, Gossypium hirsutum
  Clone ID: LIB3083-075-Q1-L1-D1-R2.pep
KEVIQPTFNLKSQQARQIKNNNPFKFLVPPQESQKRAVA

SEQ ID NO: 110843 - protein, 87 aa, Gossypium hirsutum
  Clone ID: LIB3083-075-Q1-L1-D10.pep
VLRARCCEYALLMLEHWPDVPEIQRSADLYEDLIRCCVADAMSEVRSTARMCYRMFNKTWPDRSRRLFSSFDPAIQRIINEEDGGMH

SEQ ID NO: 110844 - protein, 103 aa, Gossypium hirsutum
  Clone ID: LIB3083-075-Q1-L1-E10.pep
TPDRHVRTRLYCASESHIHSLMNVLRYCNLDESLQGEDSLICQTALKRLYKTKELDYMSYIAIRMFENTEVALEDPKRFRIELTFSRGADLSPLEMNDNKAAS

SEQ ID NO: 110845 - protein, 82 aa, Gossypium hirsutum
  Clone ID: LIB3083-075-Q1-L1-F10.pep
KQTNFCLPKIFFCSLRFRKMAQVSILKALLVALFMAFLTAATAQVSEAPSPSPDAGAGFSVGVSTAAVGFSLVVSLLALLKA

SEQ ID NO: 110846 - protein, 59 aa, Gossypium hirsutum
  Clone ID: LIB3083-075-Q1-L1-F11.pep
RIFLFLHQTLTYPAILFSIKLKTNPTYVFAHLFELSLIIIPPNTNPTSFQTNFFTKIPT

SEQ ID NO: 110847 - protein, 75 aa, Gossypium hirsutum
  Clone ID: LIB3083-075-Q1-L1-F5.pep
QFFFFFVNMRLKLRGWKYITHVRQDQNCALFSVYFNFTQNKTDGNKKIYANYTKTLMVLTRERDLLEVFEGRGGL

SEQ ID NO: 110848 - protein, 59 aa, Gossypium hirsutum
  Clone ID: LIB3083-075-Q1-L1-F8.pep
EMNVRWYFKKTAPTPKGWAENAWWGCVTNAPYLIDWTTCTMQDWGNVFDDPQSRELLQF

SEQ ID NO: 110849 - protein, 62 aa, Gossypium hirsutum
  Clone ID: LIB3083-075-Q1-L1-G2.pep
RTNDSRPMQHDRLEARRLSAPTGFTISFSVCPNLNAFFLRVFFLYEKKKHASPASTNYSESH

SEQ ID NO: 110850 - protein, 77 aa, Gossypium hirsutum
  Clone ID: LIB3083-075-Q1-L1-G5.pep
PTFKFLMHHSNKTRKPHTTLKFYSSVSTNLSRTTFKVILTHNNFSIASFITLTTLHNKYSINFILKNFNCSFSHGIN

SEQ ID NO: 110851 - protein, 46 aa, Gossypium hirsutum
  Clone ID: LIB3083-075-Q1-L1-G8.pep
KLGSRAEVHATAMLERRKRSFEIARLSYVWLGLWLIFFGLQKGLPS

SEQ ID NO: 110852 - protein, 93 aa, Gossypium hirsutum
  Clone ID: LIB3083-075-Q1-L1-H1.pep
WNCLIMGFAIYGLGKEVVSLFEQMLGAYIIPDAITFTAVLSGCKNSGLVNEGWKYFDSMSSDYGIIPTIEHYSCMVDLLGRAGYLDEAWDLMQ

SEQ ID NO: 110853 - protein, 71 aa, Gossypium hirsutum
  Clone ID: LIB3083-075-Q1-L1-H10.pep
LIQHDTNASLLNPTHAALGEGVYTTSFPTYTYIVFKTIYYHIQDISTNLHSHKLLPSSPTKFYKNYSITLS

SEQ ID NO: 110854 - protein, 76 aa, Gossypium hirsutum
  Clone ID: LIB3083-075-Q1-L1-H11.pep
SFSDESPPLLPLSRPPHIQPPHKLSLSPFSHKKKKGYFFPCGPTKKKKRSLQTIKGTPFLVCDTNHKMGCLEFMRL

SEQ ID NO: 110855 - protein, 110 aa, Gossypium hirsutum
  Clone ID: LIB3083-075-Q1-L1-H4.pep
MKLLNLSLLIHLCSLLLVSTQPTDQPPFSCDSTDPLTKSYKFCKTTLPINRRVEDLVSRLTLDEKISQLVNTAAAIPRLGIPGYEWWSEALHGVAFVANISQGIRFNGTI

SEQ ID NO: 110856 - protein, 29 aa, Gossypium hirsutum
  Clone ID: LIB3083-085-Q1-L1-A3.pep
FILITIGSFYDENRRNKKDPLMENGVAEE

SEQ ID NO: 110857 - protein, 46 aa, Gossypium hirsutum
  Clone ID: LIB3083-085-Q1-L1-A8.pep
TKVMKGPVDWIKSFLNCPSGAFKEGQADIFRVPSRLKCWIKSLAFY

SEQ ID NO: 110858 - protein, 46 aa, Gossypium hirsutum
  Clone ID: LIB3083-085-Q1-L1-B12.pep
EPFQVICRGNKEGAYLSKESACIYGSFTQDIVTDTNMNAPTHISIY

SEQ ID NO: 110859 - protein, 85 aa, Gossypium hirsutum
  Clone ID: LIB3083-085-Q1-L1-B2.pep
RIPDQGLLSPSRLFPYRGVFLGINGMACSMSLKLACVAVLCTWWGAHPCQRGPIPVEITQALSHPVWYSSQKRALVVPPRCGGGV

SEQ ID NO: 110860 - protein, 86 aa, Gossypium hirsutum
  unsure (1)..(86): unsure at all Xaa locations
  Clone ID: LIB3083-085-Q1-L1-B8.pep
DLAVLKGVLYAELVNFVPWKGMDLELKHVHADGVYGXALIRETIYSGXXLEDIFQIHIHKALGGFTTVQSLVARCSVCSKHFFLAS

SEQ ID NO: 110861 - protein, 67 aa, Gossypium hirsutum
  Clone ID: LIB3083-085-Q1-L1-C12.pep
GATYWGGCINSQSGDHSLHVVPNSPCISIQLIPKTDASFDQIYTCCLHCYTTFSIKKTILFPFHTLY

SEQ ID NO: 110862 - protein, 42 aa, Gossypium hirsutum
  Clone ID: LIB3083-085-Q1-L1-C9.pep
VLGKKKKDNLCLPFSCFKLLRQMGTEMFFLFGARFNHLHDAH

SEQ ID NO: 110863 - protein, 59 aa, Gossypium hirsutum
  Clone ID: LIB3083-085-Q1-L1-D1.pep
VYVEIKFIKYQKDSRFYTTQVCVIIHIGGCSVKNFGSVAFLKLVNPCSIQEIHFCPLLS

SEQ ID NO: 110864 - protein, 128 aa, Gossypium hirsutum
  Clone ID: LIB3083-085-Q1-L1-D11.pep
DKSYLTGLGIVWSTIRNVMDMKATYGGFAAALLQQKIWVMNVVPVHAPDTLPFIFERGLVGIYHDWCEPFGTYPRSYDLLHADHFFSRLKNRCKHPVSIVVEMDRILRPGGWVVVRDKVEILDPLEAI

SEQ ID NO: 110865 - protein, 31 aa, Gossypium hirsutum
  Clone ID: LIB3083-085-Q1-L1-D2.pep
IQVFGISNFRTVNKGSIHSIFPTSPVSPLQN

SEQ ID NO: 110866 - protein, 52 aa, Gossypium hirsutum
  Clone ID: LIB3083-085-Q1-L1-D7.pep
EPGDALNWGGPQVKAYDEKGIPNYLQTSCLWLTDSLSPPEPRMHCSGIMKST

SEQ ID NO: 110867 - protein, 128 aa, Gossypium hirsutum
  Clone ID: LIB3083-085-Q1-L1-D8.pep
QSQVPPGFRFHPTEEELLQYYLRKKVSYEKIDLDVIREVDLNKLEPWDIQERCKIGTTPQNDWYFFSHKDKKYPTGTRTNRATAAGFWKATGRDKVIYSNCRRIGMRKTLVFYKGRAPHGQKSYWIMH

SEQ ID NO: 110868 - protein, 70 aa, Gossypium hirsutum
  Clone ID: LIB3083-085-Q1-L1-F5.pep
IIESDCKYRTLLRIDICTIGTEVCIIMEWLTASIAVGRIMKFFITASRWNQSMRKGCIPKVPSPMYFTVG

SEQ ID NO: 110869 - protein, 61 aa, Gossypium hirsutum
  Clone ID: LIB3083-085-Q1-L1-F7.pep
AYRFSSMFPFLVVQVFCVSMLNKSFLPVHWFPSPAYKHFPSDPDTSYVTPTSLGGQGFFSL

SEQ ID NO: 110870 - protein, 62 aa, Gossypium hirsutum
  Clone ID: LIB3083-085-Q1-L1-G8.pep
FFFLILCRICWRVKPFFYNYTKLPLLHSLSHFHTITHCCSIQHLNQIPFKFTYQHIKPPFSF

SEQ ID NO: 110871 - protein, 90 aa, Gossypium hirsutum
  Clone ID: LIB3083-085-Q1-L1-G9.pep
QNVFMKPFVIVMRKSSAVEIRQLIIRCVSQMVLSRVNNVKSGWKSMFMVFATAAYDIHKYFVLLAFEIMEKIIRDYFPYIIVSDSSYLFI

SEQ ID NO: 110872 - protein, 57 aa, Gossypium hirsutum
  unsure (1)..(57): unsure at all Xaa locations
  Clone ID: LIB3083-085-Q1-L1-H12.pep
KCIDDDTIVDLKKVVAAHTGSLAYKIRIHKWYTAYKDHFSLKDYXFHDGVGLELYYY

SEQ ID NO: 110873 - protein, 100 aa, Gossypium hirsutum
  Clone ID: LIB3083-086-Q1-L1-A6.pep
VESIVIGMPHRGRGNVLGNVVRKPLRQIFSEFSGGTRPVDEVGLYTGTGDVKYHLGTSYDRPTRGGKRIHLSLVANPSHLEAVDPVVVRKTRAKAIYSND

SEQ ID NO: 110874 - protein, 103 aa, Gossypium hirsutum
  Clone ID: LIB3083-086-Q1-L1-B2.pep
GGFLDIAFDFINKEGGITSEIHYPYAAKQGTCDVSKENSPVVSIDGHENVPVNDEEALRKAVANQPVSVAIDAGGTDFQFYSEGVYTGQCGIEQNHGVASVGY

SEQ ID NO: 110875 - protein, 68 aa, Gossypium hirsutum
  Clone ID: LIB3083-086-Q1-L1-B6.pep
FYFLLLMMHVLYKELNRCNQCLLILIIWSSYEGFYYKENISIMFLQILINKNIHQKRKTKKPPITNFY

SEQ ID NO: 110876 - protein, 84 aa, Gossypium hirsutum
  unsure (1)..(84): unsure at all Xaa locations
  Clone ID: LIB3083-086-Q1-L1-B7.pep
MAQKSTGLIIGXTGYLRKVILVARPQEGPPPFFFLKENTLFHPVKGKLFDHIKNLRVHLLLGDVFQHXSLAKTIKQGDLVISGV

SEQ ID NO: 110877 - protein, 99 aa, Gossypium hirsutum
  Clone ID: LIB3083-086-Q1-L1-C7.pep
AQKKEKKGRNNRKKIAEKNRQLGVKRLKVHTVLKPKTVTYCRHYLKGRCHEGEKCKFSHDTLPLTKSQPCSHFARQSCMKGNDCPFDHQLSKYSCINYT

SEQ ID NO: 110878 - protein, 138 aa, Gossypium hirsutum
  Clone ID: LIB3083-086-Q1-L1-D1.pep
RTRGAEGRTKARAGKISSIYEELLMREVKDASCGASYSVIPFRKQGFRRYRQLCTEMKWLTQDLVQQCSKYRQFRHMEPSANLGMDAGVFLQDNIFLQEINGRHNVRDEFCGNIMSLLVHGSLTTRGFDKNMLMRLVT

SEQ ID NO: 110879 - protein, 54 aa, Gossypium hirsutum
  Clone ID: LIB3083-086-Q1-L1-D5.pep
DRLNRGGSQNMLYSLIKLRLTAAVVDKTTFCMFQLQNEHDLHANIYIVPIKNSS

SEQ ID NO: 110880 - protein, 52 aa, Gossypium hirsutum
  Clone ID: LIB3083-086-Q1-L1-F3.pep
LLSLARLLFPAISLDRSFSHAIQILECQDHPVIRTRLSTLAPIEIIGSKKRK

SEQ ID NO: 110881 - protein, 106 aa, Gossypium hirsutum
  unsure (1)..(106): unsure at all Xaa locations
  Clone ID: LIB3083-086-Q1-L1-F5.pep
MEMHACWCTALEKISPDTFCVIGIAIAMGVVLLRPAGGIYITGSRXIGAAIKAPRITSKNLIQAIFXEADDIYGAKVAIITQTKLESDASSHIHAPESLRAGYAIF

SEQ ID NO: 110882 - protein, 46 aa, Gossypium hirsutum
  Clone ID: LIB3083-086-Q1-L1-G2.pep
PLQTITFMLQHYYIKNLLLTNSITNLLLNAIIYTISHRNSFPQNNG

SEQ ID NO: 110883 - protein, 50 aa, Gossypium hirsutum
  Clone ID: LIB3083-086-Q1-L1-G4.pep
WFCNNKEQAILSVYHAAPDDNSLNYNKKFFFFLKHPFIFFCPTFFFKKPP

SEQ ID NO: 110884 - protein, 60 aa, Gossypium hirsutum
  Clone ID: LIB3083-086-Q1-L1-G5.pep
KNESYEEVLIYSVLLPKRRRITCLIRHVEPKLLYTLKILHKRCQNVQPHITKEQTLLFVH

SEQ ID NO: 110885 - protein, 66 aa, Gossypium hirsutum
  Clone ID: LIB3083-086-Q1-L1-H3.pep
QSFNEKLAEAENLGVILRSDLNLTQHKLESIDNDLTAVGLRESEGMEKLKSAEQQLEEHVRVLEEA

SEQ ID NO: 110886 - protein, 113 aa, Gossypium hirsutum
  Clone ID: LIB3083-088-Q1-L1-A3.pep
FFEQLCIREYQGTSFPSLAIDIDSAAKVGEEIFHVNHGCAYSVLAAVSLFVKLLCCDDELYVVSCYSLSLVGRERGFGGVKSRIRNILVVLLELDNHICIIKILYKRIGKSCG

SEQ ID NO: 110887 - protein, 114 aa, Gossypium hirsutum
  Clone ID: LIB3083-088-Q1-L1-B1.pep
LRRVFQSGDKGLGLSSNGIFEVNCSKDLKIQGVLGPCASLEKRSPMCSDTIIGQGNTSAWKMCGLDQATTLCLVFDIVRKDIPDATVQSSSSQFYFQFLTFYQHSSGEMRLRVT

SEQ ID NO: 110888 - protein, 71 aa, Gossypium hirsutum
  Clone ID: LIB3083-088-Q1-L1-B5.pep
GSFYKDLLDPIYRRNLKMKVGICPFFTNRRGILFAPTPKLKPPPPQRNFRFSQKTPQRFPFNFFFYTQTFL

SEQ ID NO: 110889 - protein, 70 aa, Gossypium hirsutum
  unsure (1)..(70): unsure at all Xaa locations
  Clone ID: LIB3083-088-Q1-L1-B7.pep
AHAFPKSLHAGLWVEFKQDXSTHPCVLLECLFLVCPSIFTPENALLAPCXNDRGSFHPNPASIMDPMHLE

SEQ ID NO: 110890 - protein, 120 aa, Gossypium hirsutum
  unsure (1)..(120): unsure at all Xaa locations
  Clone ID: LIB3083-088-Q1-L1-C1.pep
MKTTKGGKVMNPTDAYRKELRKKELKRNKKERKKVREVGILKKDPQAIMEQIEKLEVMKAEGALDKARKHRKRQLEDTLNLVLKKRKEFEDKMKEKGETPVMFSHLGPXRRRTTAEEEDR

SEQ ID NO: 110891 - protein, 64 aa, Gossypium hirsutum
  unsure (1)..(64): unsure at all Xaa locations
  Clone ID: LIB3083-088-Q1-L1-C5.pep
LPFSLSKPHTLSQIPIQDEHHTTXFTNLQCPNLELFLLKNLNPTQREINSLRHPTFITMNLIHL

SEQ ID NO: 110892 - protein, 70 aa, Gossypium hirsutum
  Clone ID: LIB3083-088-Q1-L1-D1.pep
ECHVFDVTYIWSVGRALMQYDVGVAVSFIIENGHLFAFDLCLTQIALFSLHICISITGDKLNMGSRERWS

SEQ ID NO: 110893 - protein, 135 aa, Gossypium hirsutum
  Clone ID: LIB3083-088-Q1-L1-D5.pep
FVRGIPVYAISQRLHNIISGGNGPHLLINGVKRPMPLIRILEVELYRTLLSKARSFGLSDDWIQALIKKDPVRRQVLRVNGCLAGSKAENLLEQGDMVLAVNKEPVTCFRDIENVCHALDIGESGGELNMTIFRQ

SEQ ID NO: 110894 - protein, 35 aa, Gossypium hirsutum
  Clone ID: LIB3083-088-Q1-L1-D7.pep
RLYFYLNQPITKGKANIQAKWQQHKDTICKSSELA

SEQ ID NO: 110895 - protein, 36 aa, Gossypium hirsutum
  Clone ID: LIB3083-088-Q1-L1-E7.pep
RIQMNTAKAALSACAWAASPEDPTAIRQIGIFLSSQ

SEQ ID NO: 110896 - protein, 124 aa, Gossypium hirsutum
  unsure (1)..(124): unsure at all Xaa locations
  Clone ID: LIB3083-088-Q1-L1-F5.pep
AIRIQHQHTYFSTNKFTPGMREIDYAYGVPNLQKANPPVYTIVTFPFLYAAMFPDCWHGIYSSLATLYFIVRENKLFIQKLGYIXNMTFGXLYVIMMTSLYSINTVFVYNKFFSEPFQSFCRSS

SEQ ID NO: 110897 - protein, 100 aa, Gossypium hirsutum
  Clone ID: LIB3083-089-Q1-L1-B1.pep
EKEASPKLSNAENSWSDDWDEGWESFHEIEPLEREKKGDSLLIHPLHESWTEIFKLLIKASRVKDVLKLIDQSISKPGGVLLDEGDARNLNDIVLGMDCS

SEQ ID NO: 110898 - protein, 108 aa, Gossypium hirsutum
  Clone ID: LIB3083-089-Q1-L1-B4.pep
MMRKPNNGSTITTTNNKLRKGLWSPEEDDKLINYMLTNGQGCWSDVARNAGLQRCGKSCRLRWINYLRPDLKRGAISPEEEELIVHLHSILGNRWSQIAARLPGRTDN

SEQ ID NO: 110899 - protein, 66 aa, Gossypium hirsutum
  Clone ID: LIB3083-089-Q1-L1-C3.pep
FFLNNPNLPRALDALFFGGPTLIIQDPRQARNHGFNNPRPQVNGPSGSNTMPLAPKTAALGLKPSL

SEQ ID NO: 110900 - protein, 78 aa, Gossypium hirsutum
  Clone ID: LIB3083-089-Q1-L1-F3.pep
GTARDVPMTFSPARDPWIAARVSENYSRNFSNAHSDRFRFIFAAELVEEATQKGWEKSSTENTLPVVFSEIFKNRRFA

SEQ ID NO: 110901 - protein, 103 aa, Gossypium hirsutum
  Clone ID: LIB3083-089-Q1-L1-F7.pep
ANRRGKKISLKTMNSVFSVDDFSDPFWVASATGAAAGMSRSQSEWALEKFLEEFSGAGAAIQGSRAGENVIGTSLAAPQAPVSKSENGDRDGGAVEVKKPNNL

SEQ ID NO: 110902 - protein, 47 aa, Gossypium hirsutum
  Clone ID: LIB3083-089-Q1-L1-G1.pep
IELESHHFTFSPLNFPIRLNQITTHYVSAMANHLHNFHVLDYHRLHY

SEQ ID NO: 110903 - protein, 80 aa, Gossypium hirsutum
  Clone ID: LIB3083-089-Q1-L1-H3.pep
AEHNKALQMIRDIGMYMDRTFIPNTHKTPVHELGLNLWRDVIIHSHAIQSRLQAILLENVRRERSGEVIDRGLMRSITKM

SEQ ID NO: 110904 - protein, 89 aa, Gossypium hirsutum
  unsure (1)..(89): unsure at all Xaa locations
  Clone ID: LIB3083-091-Q1-L1-A2.pep
CELSPNLFKKCTVAGALAGEHRKHTLSDVXAQVADATTLIRKMDLXARSLHSNVKAGLIAQVTEYXSHLHNVRSEAKRIMSGDLNAADL

SEQ ID NO: 110905 - protein, 42 aa, Gossypium hirsutum
  Clone ID: LIB3083-091-Q1-L1-A4.pep
ERITPRILRVSKQQVQGCLNPGTYMLRKDSGRIKTQARVMQI

SEQ ID NO: 110906 - protein, 79 aa, Gossypium hirsutum
  unsure (1)..(79): unsure at all Xaa locations
  Clone ID: LIB3083-091-Q1-L1-A6.pep
KYLSPLHSSIIDDLRLADSSLPGVHAKKLFKGLTLFSNGEVYVXDKHRDSLPEGTKLGEMKATDPNXEVPGGVADTDTG

SEQ ID NO: 110907 - protein, 88 aa, Gossypium hirsutum
  Clone ID: LIB3083-091-Q1-L1-B6.pep
MEHFRQIGEVLGSLGALMVLQDDSQINRPQCCLLFDIFGSAFNTIDWEIKLNLQLYEKNTKWNALEQPFKELQRIFIEGELFVRQSMD

SEQ ID NO: 110908 - protein, 62 aa, Gossypium hirsutum
  Clone ID: LIB3083-091-Q1-L1-B8.pep
SLGASLPTVQCSAMGKIHYDQCHLRRSSVINTIVSRTIDTYIRAYIMATCIFTSPIAICIWT

SEQ ID NO: 110909 - protein, 101 aa, Gossypium hirsutum
  Clone ID: LIB3083-091-Q1-L1-C2.pep
ESEESSGENGSESAESGKNYGVDGTADKLKHVGKEANLTEEKNGKNQDEHLELSADHNIVESKENNQASNEILPAGAQSEILTETTTQNGAWSTQAVEIPE

SEQ ID NO: 110910 - protein, 118 aa, Gossypium hirsutum
  Clone ID: LIB3083-091-Q1-L1-C4.pep
NDNSENTSLDSKVDENSGVVASSQNGSEENSSGLGSRGMRIKEKLERELSPIELEVEDVSYQHAGHAGVRGSDGETHFNLRIVSKEFEGKSLVKRHRLVYSLLDEELQSGLHALSIVA

SEQ ID NO: 110911 - protein, 29 aa, Gossypium hirsutum
  Clone ID: LIB3083-091-Q1-L1-D2.pep
VRPSPRSRVLKAHAWEAWLRNKNYSEEGE

SEQ ID NO: 110912 - protein, 85 aa, Gossypium hirsutum
  Clone ID: LIB3083-091-Q1-L1-D8.pep
NNNTGSIYFKEEELIDHDNDKQFKPYKVQSKTKNYKPYGSKNSSSALMKKNQYSNNCISQADSIKWQICATNSHLKQPIKNISFN

SEQ ID NO: 110913 - protein, 74 aa, Gossypium hirsutum
  unsure (1)..(74): unsure at all Xaa locations
  Clone ID: LIB3083-091-Q1-L1-F8.pep
PEKLFTGVRQMHFFKWVAEIMLTNNRTLVXLGTFDTVXASDMAYNTEIHIFRREYAHFNFPDHKDQVLANSFNG

SEQ ID NO: 110914 - protein, 134 aa, Gossypium hirsutum
  Clone ID: LIB3083-091-Q1-L1-G7.pep
FSQEGSIDPFSDSINMIGSVEDTGEGIPIEAQSRVFTPFMQVGPSISRTHGGTGIGLSISKCLVNLMKGEIGFVSIPKIGSTFTFTAVFTSGSSSSKEYKSQQINNQTNSVSSEFRGKRALVVDPRSVRAKVSR

SEQ ID NO: 110915 - protein, 55 aa, Gossypium hirsutum
  Clone ID: LIB3083-091-Q1-L1-H6.pep
GGVWRRPCKEPLVGVPILWPILARFRIFYCCLDNYGCIEPRVIWLITTWVILVIG

SEQ ID NO: 110916 - protein, 51 aa, Gossypium hirsutum
  Clone ID: LIB3083-091-Q1-L1-H7.pep
RTRTSRPAALIQLYTNFFLKSTATDYNWSVSKETVIDPIKINLPDSPPPPF

SEQ ID NO: 110917 - protein, 131 aa, Gossypium hirsutum
  Clone ID: LIB3083-094-Q1-L1-C12.pep
LFRRTLRAARQHTVDVHSKVVLAAWLRYERREDELRGTNSMNCCGRNIECPKATLVPGYNPEFIYDPCVCSKNPQGESVDDYSIEDVECSTSDEYKDMSFCIGDNEIRCIRYCIASLSTPFMTMLYGGFRE

SEQ ID NO: 110918 - protein, 33 aa, Gossypium hirsutum
  Clone ID: LIB3083-094-Q1-L1-D10.pep
AIANPTNYARQRFGVVLTPWMWERFYQSFCILH

SEQ ID NO: 110919 - protein, 58 aa, Gossypium hirsutum
  Clone ID: LIB3083-094-Q1-L1-E10.pep
TDFGLSVFFKPRNIFKDLVGSAYYVAPKVLSRRYGHEAYIWSAGVILYILLNGIPPFY

SEQ ID NO: 110920 - protein, 79 aa, Gossypium hirsutum
  unsure (1)..(79): unsure at all Xaa locations
  Clone ID: LIB3083-094-Q1-L1-E12.pep
CTKCVTVGDGAXGKLXMPIPYTCYTLTTDHVPTVYDNYSANVEDDGHTSNLVLWDTAWHEDYNTLKPLSYRRADVLLQG

SEQ ID NO: 110921 - protein, 108 aa, Gossypium hirsutum
  Clone ID: LIB3083-095-Q1-L1-F10.pep
IIMVGDHGMVGTCDKKLIFLDDLAPWINIPGDWVQYYSPVLSIRPPPGYAPSDVVAKMKEGLESGRVDNGKHLRVYLKEELPSRLHYAESDRIPPIIGLVDEGFTVEK

SEQ ID NO: 110922 - protein, 85 aa, Gossypium hirsutum
  Clone ID: LIB3083-095-Q1-L1-H12.pep
KGEMEEEKKKKRNKKKKNKQGKATEEDVDQIQNNNVSNGQSSGNALDLDTHQPNGALPSSAEEMIKELQKENELHVQKEATLQER

SEQ ID NO: 110923 - protein, 48 aa, Gossypium hirsutum
  Clone ID: LIB3083-102-Q1-L1-A10.pep
DQASDMVSKDMVSNIVDNTLACLSRGQDYNPSRDHYFEDLQQMEKYIL

SEQ ID NO: 110924 - protein, 61 aa, Gossypium hirsutum
  Clone ID: LIB3083-102-Q1-L1-B12.pep
GLSEFSYSLPPPPLIALCSFFISSFCKENYSWHILNCCLALPWNYIWPGWLLKEKKKKKKP

SEQ ID NO: 110925 - protein, 54 aa, Gossypium hirsutum
  Clone ID: LIB3083-102-Q1-L1-E12.pep
FFFFIASTCKMLPILLHVNITVAYRTDSFHLYLFIFRILFTNLKLPIFQDVTLS

SEQ ID NO: 110926 - protein, 116 aa, Gossypium hirsutum
  Clone ID: LIB3083-102-Q1-L1-E9.pep
VGLLQSIINSITVGKYKKGDGLIEGTECSVCLNEFQEDETVRLLPKCNHAFHISCIDTWLRAHTNCPLCRAHIVFDALCSTPTSADQNPDNMDAIIDYNQTKTSEIGGMNSYENKA

SEQ ID NO: 110927 - protein, 68 aa, Gossypium hirsutum
  Clone ID: LIB3083-102-Q1-L1-F9.pep
LLLLLSLILLRDNWHRLIPSQIQTLNLRLPFTPFFSLNRKNSSYLSLASGGGARERVPCSVVSRSSKF

SEQ ID NO: 110928 - protein, 128 aa, Gossypium hirsutum
  Clone ID: LIB3083-106-Q1-L1-A4.pep
AFLGQDSLNVAKVVAVFVSMAGVVMTTLGKTWAADDSIGSANGKRSLVGDLFGLLSAMSYGLFTVLLKKFAGEEGERVDVQKLFGYIGLFTLVALWWLVWPLTALGIEPKFTIPHSAKLDEVVLANGF

SEQ ID NO: 110929 - protein, 120 aa, Gossypium hirsutum
  Clone ID: LIB3083-106-Q1-L1-B1.pep
KDQQEVVLSSEQDAFFKANMYENFGDIGMNIKRMVDDFQQVAKSNQNIQTIEDMAKFVDNYPEYRKMHGNVSKHVTLVTEMSKIVEERKLMLVSETEQDLACNGGQVAAFEAVTNLLNNE

SEQ ID NO: 110930 - protein, 77 aa, Gossypium hirsutum
  Clone ID: LIB3083-106-Q1-L1-C6.pep
VINHFIGERKNLYKVWEMHPLSLMILALRVNQMRKHIRHSTKRTHHHLEGLTPGVVITFLPIRKGIRAVITKIILMR

SEQ ID NO: 110931 - protein, 112 aa, Gossypium hirsutum
  unsure (1)..(112): unsure at all Xaa locations
  Clone ID: LIB3083-106-Q1-L1-D3.pep
KLKENQTHGFDLVKETEEKVKVICNYLKATTDRQKSYADLKXKEIEFQVGERVFLKVSPWRKVLKFGKRGKLSTRFIGHYEKTERVGPVAYRLALPLELEKIHDVFYLSMLC

SEQ ID NO: 110932 - protein, 95 aa, Gossypium hirsutum
  Clone ID: LIB3083-106-Q1-L1-E3.pep
MLNLIKTRDNYYIINNDAKSNKPQFLTFYMIMSTSTRKTLSNISPSFANNSLRVMYNYMSGRAERIRRFSPALLYKNFHLYLLSSDHHYQHHYIM

SEQ ID NO: 110933 - protein, 77 aa, Gossypium hirsutum
  Clone ID: LIB3083-106-Q1-L1-E5.pep
ESGRSAIFHYGSGRKIERAYNGAPASASFRFSGGPEERALMCSSSENSGIKKNIGQRLIKGLKCALQPKMALITRKV

SEQ ID NO: 110934 - protein, 67 aa, Gossypium hirsutum
  Clone ID: LIB3083-106-Q1-L1-E7.pep
RYVPFRNFCLQNILVFSLNEDGFTLLMLSVSVERTSRYFNHVKCHYSRSLSNSVSFIARLEGGRLFH

SEQ ID NO: 110935 - protein, 59 aa, Gossypium hirsutum
  Clone ID: LIB3083-106-Q1-L1-F7.pep
FCLSSLVQDAVFIFFRGCPQAMPANLPFVIQSILTVVGPFKFLDCLGYWLYLYTWCRRC

SEQ ID NO: 110936 - protein, 99 aa, Gossypium hirsutum
  Clone ID: LIB3083-106-Q1-L1-H2.pep
IQIIVKHNQKKFQLRKPDSIQTTKTIESTTQQRARRAGVAHCVLFKEHDQVPHTELLGHGRENYCTINRTSAIKGTINDYTKRFRITTLLSQTRHSGAT

SEQ ID NO: 110937 - protein, 132 aa, Gossypium hirsutum
  Clone ID: LIB3083-110-Q1-L1-A6.pep
AVLRRREEEINKGLKEMQDEKEGLEQQLQVVLMNTDVLDSWIRDNEGKIKNLGKKNNNVAVDEAIHCVDVLSKQVLDSTAADLAIEDVVYSLDKAVQDGVVPFDQYLRNVRLLSREQFFHRATASKVKEAQM

SEQ ID NO: 110938 - protein, 107 aa, Gossypium hirsutum
  unsure (1)..(107): unsure at all Xaa locations
  Clone ID: LIB3083-110-Q1-L1-A7.pep
SSASNEFLEGNDVAAXGDAMKTAFMLLLNGQTLPQLFITIVXYALTSKDHTVPKLFVLYXEMIAKTDAMGRVLPEMKLILQYLRNNFQHANEYIGGATSALLCRLND

SEQ ID NO: 110939 - protein, 105 aa, Gossypium hirsutum
  Clone ID: LIB3083-110-Q1-L1-B2.pep
SSAIRVTKRRRLDRKKQQSERNVFQCFVFGPANAGKSVLINSFLGRPYSDTYSPTIDDRYAVNVAELPGGIKKTLVLREIPEDGVAKLLSSKDSLAVCDIPVFVH

SEQ ID NO: 110940 - protein, 112 aa, Gossypium hirsutum
  Clone ID: LIB3083-110-Q1-L1-B3.pep
DTQKMTNSFWWGSERGRRRTHWASWERLYVLKKYGDMGFRKLYCFNLAQLGNQGWRFLTSPKSVSWKIFKARYFSKSYFLDSSEGSTPYFIWKSIRKAKAVLLKCTRWRIGR

SEQ ID NO: 110941 - protein, 40 aa, Gossypium hirsutum
  Clone ID: LIB3083-110-Q1-L1-B4.pep
NSRLLTASYLLRRTLSSPNDKLFLLGPVKFPNQECLYRPF

SEQ ID NO: 110942 - protein, 127 aa, Gossypium hirsutum
  Clone ID: LIB3083-110-Q1-L1-C6.pep
YSVILLTFYSASVSGYWAFGNKSNSNILKSLMPDDGPSLAPTIVIGLAVIFVLLQLLAIGLVYSQVAYEIMEKQSADVNQGMFSKRNLIPRLILRTLYVIFCGFMAAMLPFFGDINGVIGAIGFIPL

SEQ ID NO: 110943 - protein, 40 aa, Gossypium hirsutum
  Clone ID: LIB3083-110-Q1-L1-D6.pep
TFSISSPGSTCSEISASGIGISSGLSIYGELPIKLCFPVL

SEQ ID NO: 110944 - protein, 70 aa, Gossypium hirsutum
  Clone ID: LIB3083-110-Q1-L1-E2.pep
RFLPYIGPIGIYDMQHVSPYFFYIRKHFVHKTFPHNTNHHPPYSNGVKDLNQITVKTRKIQTLIPNPHTR

SEQ ID NO: 110945 - protein, 70 aa, Gossypium hirsutum
  Clone ID: LIB3083-110-Q1-L1-F6.pep
HERVRFSGFLRRLLRVWVLLMFIHTIGNALILKLISVSFLNILPFRGGASDFIHSTMIIIASMQAALGLN

SEQ ID NO: 110946 - protein, 45 aa, Gossypium hirsutum
  Clone ID: LIB3083-110-Q1-L1-G2.pep
DCPIISKVFIPTRANLESALLLGLIHHIVDTDALMLLWRGVSIED

SEQ ID NO: 110947 - protein, 70 aa, Gossypium hirsutum
  unsure (1)..(70): unsure at all Xaa locations
  Clone ID: LIB3083-110-Q1-L1-G3.pep
RLTCVCFTRKXTYEGISFNITPQQDERLYRLRHPMKVYYDGFRLCHHEALRSLWCDSYPXKELHCLISDQ

SEQ ID NO: 110948 - protein, 43 aa, Gossypium hirsutum
  Clone ID: LIB3083-110-Q1-L1-G4.pep
SMQIVFEDKLKPEVRTMDERKLLMTQSKETGKALFIINYRVIC

SEQ ID NO: 110949 - protein, 50 aa, Gossypium hirsutum
  Clone ID: LIB3083-110-Q1-L1-H7.pep
IFPALSLVLQHYRYVFNMTAGNACSKHIYIARVSTNPLFNSVPLASLPQF

SEQ ID NO: 110950 - protein, 97 aa, Gossypium hirsutum
  unsure (1)..(97): unsure at all Xaa locations
  Clone ID: LIB3083-111-Q1-L1-A11.pep
MEVSEKHEETHSNRTERLAGTVNWGTATVIGVFAGMLYGGSKEAAASVSKDAEVMLKLGSTPDKREQYRLMRDAMEKRFIRVTRGSIVGXIRLGMFT

SEQ ID NO: 110951 - protein, 47 aa, Gossypium hirsutum
  Clone ID: LIB3083-111-Q1-L1-A12.pep
AYHGLLIHATRITGVICKANTGILIHPQTQTAVGMSLCNRLCISLTT

SEQ ID NO: 110952 - protein, 61 aa, Gossypium hirsutum
  Clone ID: LIB3083-111-Q1-L1-C12.pep
NAKSPCLVGLNTTKSWGTRFIIFLKFLGKWPLVKCYGGLKRAGFYFFEAPQSFCQNISRGS

SEQ ID NO: 110953 - protein, 89 aa, Gossypium hirsutum
  unsure (1)..(89): unsure at all Xaa locations
  Clone ID: LIB3083-111-Q1-L1-D11.pep
MADHSDDLDQLLDSALDDFQNLNLTSASQRAGGDGEEKKQESGSLPSGVVGLXMGLPDXRARNXGMQMVSSESHVTEALVXMREQPYRL

SEQ ID NO: 110954 - protein, 116 aa, Gossypium hirsutum
  Clone ID: LIB3083-111-Q1-L1-E10.pep
LSLLLFSSATACDRCLYQSKAAYFSKANALSSGACGYGSLALGLSGGHLAAGVSSLYKDGAGCGACFQIRCNNSTLCSSKGTNVTITDINHNNQTGFVLSTRAFVAMANHGMGQHI

SEQ ID NO: 110955 - protein, 117 aa, Gossypium hirsutum
  Clone ID: LIB3083-111-Q1-L1-F12.pep
SVMRGLINGRSYCSSSICIGNGQVYRSAIVGRSLQLSGQRNGVAFGGFEWRRMMSSSPASVEKATSEKEDKTENSVKEETKENEVMAVSYWGISRPKITREDGTDWPWNCFMPWETY

SEQ ID NO: 110956 - protein, 134 aa, Gossypium hirsutum
  Clone ID: LIB3083-111-Q1-L1-G12.pep
HLVIRGKRPPPPSAGTPGNLYVCNHRTALDPIVIAIALGRKVSCVTYSVSRLSRFLSPIPAIALTRDRAADAARISELLQKGDLVVCPEGTTCREQFLLRFSALFAEMSDRIVPVAVNCKQSMFYGTTVRGVKF

SEQ ID NO: 110957 - protein, 45 aa, Gossypium hirsutum
  Clone ID: LIB3083-111-Q1-L1-H11.pep
VLDHWVGRTSNFDQYRHLRCGSLTILAPQNTGVIPHPKPLKGFGT

SEQ ID NO: 110958 - protein, 58 aa, Gossypium hirsutum
  Clone ID: LIB3083-112-Q1-L1-E9.pep
SNPNPQNSKFLFYSGWKVESFNLIKSEEKSQPFVFDTIKKTINCKFNFQGGKYKKHET

SEQ ID NO: 110959 - protein, 75 aa, Gossypium hirsutum
  Clone ID: LIB3083-112-Q1-L1-H11.pep
YNIQKESNLHLVVRYRGGFQSGVMCLFPEFALLRTCPCFETLKPLPEWPGEETQAYVEVQWAVNASFQRSHQLNL

SEQ ID NO: 110960 - protein, 85 aa, Gossypium hirsutum
  unsure (1)..(85): unsure at all Xaa locations
  Clone ID: LIB3083-117-Q1-L1-A6.pep
LVFLCFDFFLVLYLSIYYFIFIIIVFGCVGVGVFFFFSFFFIFYTFFFFIFIXIFNFLFYFFLYLIILYYFYIFFFFIYIVFNIF

SEQ ID NO: 110961 - protein, 52 aa, Gossypium hirsutum
  Clone ID: LIB3083-117-Q1-L1-C10.pep
DRTAPNMGYMSNACKADLTVRDRVLIHAQCVGVSIWHVLSSYDYQQLWLCEC

SEQ ID NO: 110962 - protein, 40 aa, Gossypium hirsutum
  Clone ID: LIB3083-117-Q1-L1-D2.pep
QDPARSHESFFTPVQLVLIEVSDRHQTDLLPRCITTKVPN

SEQ ID NO: 110963 - protein, 44 aa, Gossypium hirsutum
  unsure (1)..(44): unsure at all Xaa locations
  Clone ID: LIB3083-117-Q1-L1-E12.pep
NXFLLDVTSAVMFQSLTSNCGRSLLICLEFNNSLCENXINRKGF

SEQ ID NO: 110964 - protein, 55 aa, Gossypium hirsutum
  Clone ID: LIB3083-117-Q1-L1-E2.pep
IKTLLFYVCISMLDNANYAGGMKYLFLILCKTEEYIKKKTRGAPSQGRYICGYTC

SEQ ID NO: 110965 - protein, 110 aa, Gossypium hirsutum
  unsure (1)..(110): unsure at all Xaa locations
  Clone ID: LIB3083-117-Q1-L1-H1.pep
TYSLLHFYYFLIYINIVCYIFSYALIYYLFLLFXYIYFIFIIYFFIFFIKYFLFLNIIKFINFLIFYXYFYNSFFLFNWGGLIFNFFXFFFYNFFFFYFFYFFYYIIFLF

SEQ ID NO: 110966 - protein, 53 aa, Gossypium hirsutum
  Clone ID: LIB3083-117-Q1-L1-H10.pep
GAESPRICVCSRSLPILFQRPNNNLDPFLLDPQASLSLSSLIIILSKDAPYIT

SEQ ID NO: 110967 - protein, 113 aa, Gossypium hirsutum
  Clone ID: LIB3083-118-Q1-L1-A5.pep
MLRFTLLWLLVFLFASISSSSARPAPYAMRISCGARQNIRTPPTYTRWYKDFAYTGGIPANATAPSHITPPLKTLRYFPLSEGPENCYIINRVPKVHYSVRIFFGLVEHEIDN

SEQ ID NO: 110968 - protein, 84 aa, Gossypium hirsutum
  Clone ID: LIB3083-118-Q1-L1-B7.pep
KRTSKVVLKAIVDCSCHNLTMPYTMHMGLSYPCGHGRHHYRWVRIQKLCGYQCWYNLRTSSFRLFSFTFFSLLFSSFYRSSLSC

SEQ ID NO: 110969 - protein, 42 aa, Gossypium hirsutum
  Clone ID: LIB3083-118-Q1-L1-C7.pep
SITLYYIFFNEFNIILKECRFLYTYIYKSPILYIIPLKSFKT

SEQ ID NO: 110970 - protein, 128 aa, Gossypium hirsutum
  unsure (1)..(128): unsure at all Xaa locations
  Clone ID: LIB3083-118-Q1-L1-D6.pep
LSGASSLLNNEYYEALQLKLREPNLGAKLFLGGHGVQKTGTEIATALNNIDLSSEYVLKLKHEIEEQCAEVFPAPAEREKVKSCLSELADLSNTFRQALNAGMEQLVATVTPXIRPVLDSVATICYEL

SEQ ID NO: 110971 - protein, 76 aa, Gossypium hirsutum
  unsure (1)..(76): unsure at all Xaa locations
  Clone ID: LIB3083-118-Q1-L1-D7.pep
LTDVPKRSRIKKNGVDDYHFCVHLVSXENENVSSEAFESTLISCIKYMSYYAWKDAFHLLIRVYPFHVLRINKILL

SEQ ID NO: 110972 - protein, 42 aa, Gossypium hirsutum
  Clone ID: LIB3083-118-Q1-L1-F5.pep
MREGGLIYIGEGGIQVGNSCLELYCLEHVISSYGQMSSDKTV

SEQ ID NO: 110973 - protein, 38 aa, Gossypium hirsutum
  Clone ID: LIB3083-118-Q1-L1-G5.pep
INNKQQIWHHRYPRRPPTQVKIVSLLVPIRIWRINQYL

SEQ ID NO: 110974 - protein, 35 aa, Gossypium hirsutum
  Clone ID: LIB3083-118-Q1-L1-H4.pep
KTWEHSLLKEFYLHGSILSSLSDAIWFLSYTLLKQ

SEQ ID NO: 110975 - protein, 67 aa, Gossypium hirsutum
  Clone ID: LIB3083-118-Q1-L1-H5.pep
NNLAKSPRKAILRVGRILKLSHEYRIPSICNAPKFFRMISSLYELESFCSLLFEVFFIVSNQLYSLL

SEQ ID NO: 110976 - protein, 56 aa, Gossypium hirsutum
  Clone ID: LIB3272-056-P1-N1-A5.pep
VVLVKKGLLIRAFGQLVFGLNHGFIFKLRYISNNCLLVSFMSTKDEGVSCSYTNQP

SEQ ID NO: 110977 - protein, 55 aa, Gossypium hirsutum
  Clone ID: LIB3272-056-P1-N1-A6.pep
WALTWGCVGAFQQVLLFCSSGKKSLDDIRIFQYRAMGEIPPLFFFFLGIRELFIY

SEQ ID NO: 110978 - protein, 67 aa, Gossypium hirsutum
  Clone ID: LIB3272-056-P1-N1-C1.pep
VIHMRYIIPNLKSNIFKEATIQILKYDHLLGYHYQLQGYSFFKVEVAMVLTCNLKLTIYYSINRSHN

SEQ ID NO: 110979 - protein, 79 aa, Gossypium hirsutum
  Clone ID: LIB3272-056-P1-N1-C11.pep
KGRATLNLKSIKIYSQTYSMNIIAHIPTFMKWIANHRFVVLKPQTSMPPQLLLLKHKKMHPLLNVNFKYEQQDQMVPFL

SEQ ID NO: 110980 - protein, 78 aa, Gossypium hirsutum
  Clone ID: LIB3272-056-P1-N1-C12.pep
ILYKGAVYTVKLKSELLSTNEQQKRVAKRQTRCEYQTRHVLFCCFFRELKIGVCSFMRVCDSLGDFTWSMKVVCVCAH

SEQ ID NO: 110981 - protein, 62 aa, Gossypium hirsutum
  Clone ID: LIB3272-056-P1-N1-C2.pep
FTLFCPLEAEQQVYGGLYSPKLPSKQEAFSRFYICLSDMPIIWKRALHPTRYRYLKRISLMY

SEQ ID NO: 110982 - protein, 33 aa, Gossypium hirsutum
  Clone ID: LIB3146-011-Q1-K1-A12F2.pep
CGFLFSLRYSSNVSMYMNSHIIFNASLNCAILY

SEQ ID NO: 110983 - protein, 76 aa, Gossypium hirsutum
  Clone ID: LIB3584-039-P1-K1-B7.pep
RHELLQACIVSDVSWYASGDECMISPLCGSSGHIARKIGEREGLQGSRLSSLVELRAQVRVFLWLRSRAFERPTRP

SEQ ID NO: 110984 - protein, 155 aa, Gossypium hirsutum
  Clone ID: LIB3584-039-P1-K1-D1.pep
PRVRPRVRPRVRIFREEIQLVSSTFAHSIVHAFRTLEQVWEELCVDIREGILTSRITFPSVRSAMAKLLKPNPELADLIRRKISGLSNWYGLIPELFPNVKYIYGIMTGSMEHYLKKLRHYAGDVPLISADYGSSEGWIGANINPNVPTESTTYA

SEQ ID NO: 110985 - protein, 138 aa, Gossypium hirsutum
  unsure (1)..(138): unsure at all Xaa locations
  Clone ID: LIB3584-039-P1-K1-D7.pep
MSTLTVPMTVPSKSDECEQLTKAFSGXXTNEGLIIDIXSHRNTKQRNLIXKTYSGTYGKYLLTVLDKELSNDYERLDLIYALDPAXHDALLANVAPKRWTASNLVLIEIDCTWSANQLLHAKDAYHACYKKLLEEDVD

SEQ ID NO: 110986 - protein, 121 aa, Gossypium hirsutum
  unsure (1)..(121): unsure at all Xaa locations
  Clone ID: LIB3584-039-P1-K1-D9.pep
MKTITGKTITLEAKSSDTSANVKTINQDKERIHADAPSVDLXGKQLRATSRTLADYNIENEATVHIELRRHVGMHILLISLTGKTITLEVESSGTIDNGNAMIHDKVRIHTDQIRLILVGK

SEQ ID NO: 110987 - protein, 138 aa, Gossypium hirsutum
  Clone ID: LIB3584-039-P1-K1-E1.pep
SQCMPNCFWEKMGSHCKRHYDITMSKRTRKPLNLQEANRQSQNHSSEWDIIPLKSIAHILDQSSPGKGEHEGGDRKSLKQLIKGDENANSKEMMGRSAKSSTSLTLGHHFTEEEKQLQLVTKHQHDNGLKLKEIMSRY

SEQ ID NO: 110988 - protein, 147 aa, Gossypium hirsutum
  Clone ID: LIB3584-039-P1-K1-E2.pep
PRVRDDDDPIFCSAWPHLQIVYDLLLKFITSSCLDAKVAKKYIDHAFILRLLDLFDSEDPRERECLKTILHRVYGKFMVHRPLIRKDISNIFYRFVFEEERHNGITELLDIFGSIISGFALPLKEEHKIFLQRVLIPLHKPKTLGVY

SEQ ID NO: 110989 - protein, 106 aa, Gossypium hirsutum
  Clone ID: LIB3584-039-P1-K1-E7.pep
MLNLFSLRGLPWTGADGQQKVQLTAAELESLRSELADIEEREAHMKARLEHIDGILRSARLSGYLYIRTRWTALPGEPAPIDDTKINDWLPRFIVLHGQCIFFYLL

SEQ ID NO: 110990 - protein, 145 aa, Gossypium hirsutum
  Clone ID: LIB3584-039-P1-K1-G8.pep
PRVRPRVRPRVRESRMGYIAPNLSTIVGSAVAAKLMGTAGGLSALAKMPACNVQLLGAKKKTLAGFSTATSQFRVGYIEQTEIFQTTPPALRSRACRLLASKATLAARIDSTRGDPLGNAGKTLKEEIHKKIEKWQEPPPAKAAK

SEQ ID NO: 110991 - protein, 36 aa, Gossypium hirsutum
  Clone ID: LIB3146-001-P1-K2-E4.pep
GIFKTRCVLVISYDVSMNYPNYPQFSMMLKDLKSLH

SEQ ID NO: 110992 - protein, 146 aa, Gossypium hirsutum
  Clone ID: LIB3146-001-P1-K2-F11.pep
GIPNTLNVIFYFPFLVIGVISLVLCFYKNYFKFSLQGELWGWTCFFIGVAAVGVGSSYYHLDPNDARLVWDRLPMTIAFTSIMAIFIIERIDLQNGTISIIPLLLAGLISILYWRFFDDLRPFANVQFVPCIVIPLMAILLPSIYT

SEQ ID NO: 110993 - protein, 59 aa, Gossypium hirsutum
  unsure (1)..(59): unsure at all Xaa locations
  Clone ID: LIB3146-001-P1-K2-H9.pep
IHNCNNFTYILSVTLFPYLPRFILLNISARXNLNQIIYNYHILSSSSSSQNPYLKFPLL

SEQ ID NO: 110994 - protein, 39 aa, Gossypium hirsutum
  unsure (1)..(39): unsure at all Xaa locations
  Clone ID: LIB3146-003-P1-K1-B6.pep
NFACGVHINGDYCYKGDVFLQLPTVKGVVXXFSIGYNNN

SEQ ID NO: 110995 - protein, 63 aa, Gossypium hirsutum
  unsure (1)..(63): unsure at all Xaa locations
  Clone ID: LIB3146-003-P1-K1-C7.pep
SSRLFNNKSSLVMLLYKIFSVTFMWLQVYILLLCNVLWIKKILSVSWMFVELISQFCILSLXE

SEQ ID NO: 110996 - protein, 56 aa, Gossypium hirsutum
  Clone ID: LIB3146-003-P1-K1-F1.pep
LKMTSTNNEYMITPIKVSKYYKLMITISIMIFTNYEMIFNLHHSILIQFNPKQYYN

SEQ ID NO: 110997 - protein, 93 aa, Gossypium hirsutum
  Clone ID: LIB3146-004-P1-K1-A10.pep
MIYPNSSVSTKQAPKDYVPCYHIIFFGVRPLFLYIIYIYSVSCVQMASNFKGKQILGEGLKLYFYKLHLVDIFVIFKLNNPRLSPFKKKKKIK

SEQ ID NO: 110998 - protein, 47 aa, Gossypium hirsutum
  unsure (1)..(47): unsure at all Xaa locations
  Clone ID: LIB3146-004-P1-K1-A4.pep
PTRXATRXLRNFESESPSNARCFFCISKCIDCACIAYCAFMLRKKLT

SEQ ID NO: 110999 - protein, 141 aa, Gossypium hirsutum
  Clone ID: LIB3146-004-P1-K1-A6.pep
TPFVHAVRDFEVDGYLHNEEERRFKKIIWEEINREYLEEQAAKEAALAAAKEACMANYDKCPEDLQAAQELAAAAAEVVAKSKKERLQKRAAEAKNARPAKTAAEATRQMLVKKRLSSKINYDALEKLFDEPVATEKCKKQ

SEQ ID NO: 111000 - protein, 57 aa, Gossypium hirsutum
  Clone ID: LIB3146-004-P1-K1-B11.pep
LLRFSIYSGHVLIHQLMYPFFFSCITSEYMPMTNVITYNVFWMFLFKCDFFCRFIIY

SEQ ID NO: 111001 - protein, 54 aa, Gossypium hirsutum
  unsure (1)..(54): unsure at all Xaa locations
  Clone ID: LIB3146-004-P1-K1-H12.pep
LNGHLYLVFDGNQTTLAIMRTFNAVQRCMEHMQSPTTVSKHLAMSYPTRPXTRG

SEQ ID NO: 111002 - protein, 85 aa, Gossypium hirsutum
  unsure (1)..(85): unsure at all Xaa locations
  Clone ID: LIB3146-005-Q1-K1-H1.pep
RPAXGXFSRYKGRSGRIWIRASRSTSRVQAGLVSGAIARLKLENADGRLDSVTRASDICVSLTTECAGHRNRSALHHLRRRQTDS

SEQ ID NO: 111003 - protein, 146 aa, Gossypium hirsutum
  unsure (1)..(146): unsure at all Xaa locations
  Clone ID: LIB3146-061-Q1-K1-H7.pep
IKHPRNFLVALVNAILLPLRIATKAYHYHHXLSLKQPXXESEDPEXIFYTKKGTTQXRTGFQPLRFGVYEQFLKDRXIIRAQYQXNILDLFPRQRXDTGRIHWPQTTXXMQXAEGXXNSQVXKXXEXXAPXXKXHFXXKRYTEKXG

SEQ ID NO: 111004 - protein, 64 aa, Gossypium hirsutum
  Clone ID: LIB3149-001-P1-K1-H11.pep
SDKPCFNILFHKTPCKYIKESPDNICIRLTFILRICFIKRFIIYQFFKALLEHAKRLTIDVTSK

SEQ ID NO: 111005 - protein, 73 aa, Gossypium hirsutum
  unsure (1)..(73): unsure at all Xaa locations
  Clone ID: LIB3149-002-P1-K2-A10.pep
XHAHXMHTXTIHTPLQKLENAIXXFHQXMLHRXWTXXTRSSQYXXYQXRPKPEKPNAIKRKRXXPSRTAWVXP

SEQ ID NO: 111006 - protein, 70 aa, Gossypium hirsutum
  unsure (1)..(70): unsure at all Xaa locations
  Clone ID: LIB3149-002-P1-K2-B5.pep
MFIYFFLFXLIILYFIFIYFFFLNFIYLIFLFIFILFYXIFQIFFILFILYSLISYFYFFYFIFLFNFKF

SEQ ID NO: 111007 - protein, 36 aa, Gossypium hirsutum
  Clone ID: LIB3149-002-P1-K2-E6.pep
CQVNFLSTFLPSIIIIHPSLNQSLRTSRIHDFTVHV

SEQ ID NO: 111008 - protein, 54 aa, Gossypium hirsutum
  unsure (1)..(54): unsure at all Xaa locations
  Clone ID: LIB3149-002-P1-K2-H3.pep
AEALGDAMQAQVISPEWPAAFXLQAAALFSLGMDNDANETLKDGTNLEAKNHRN

SEQ ID NO: 111009 - protein, 65 aa, Gossypium hirsutum
  Clone ID: LIB3149-003-P1-K1-G9.pep
KKERKETEKENCNPLLTSSHAVGAPAPLTEPCLIVQFSNSFRSLSFYLFRSQLNPTIKYSTNNIK

SEQ ID NO: 111010 - protein, 58 aa, Gossypium hirsutum
  Clone ID: LIB3149-004-P1-K1-C11.pep
FAFTVHVAFVIQSALFLDMSISTALFDNPISCKTIMLCHAIMLAVATVLTVAQLFNFG

SEQ ID NO: 111011 - protein, 131 aa, Gossypium hirsutum
  unsure (1)..(131): unsure at all Xaa locations
  Clone ID: LIB3149-004-P1-K1-D1.pep
MRSPVFESTGYVSTDVVIVGSGVVGGLISDQLVSQVHSVLILESGMRIERGQSVESWRSMPFVTCVGXDFQALYPQAHNAPAPLYFPNDNFVAVSGRNGQSFQQGYLRSVGGTTCHWVARSWRRLPVDGWI

SEQ ID NO: 111012 - protein, 57 aa, Gossypium hirsutum
  Clone ID: LIB3149-004-P1-K1-D9.pep
FGFFFFFFYQKITGIMHFNEPLKEGIKNISKSHNRMTIGSLLCDFTHTFLHWAPMAT

SEQ ID NO: 111013 - protein, 85 aa, Gossypium hirsutum
  unsure (1)..(85): unsure at all Xaa locations
  Clone ID: LIB3149-004-P1-K1-F3.pep
ALNADMTTSRCVDESSYLQSGEMAHHGTPSTGPFXVRITSGSTYGRSLDIAKDSSYNELRRELARMFGLEGHLEDPKRSGWQLVF

SEQ ID NO: 111014 - protein, 56 aa, Gossypium hirsutum
  Clone ID: LIB3149-005-Q1-K2-F6.pep
SAPDSIKIQTSLLQMMSPLAFHHASEGIRHTKGPHISPFPLSIFSSFHKTYVCYSL

SEQ ID NO: 111015 - protein, 91 aa, Gossypium hirsutum
  unsure (1)..(91): unsure at all Xaa locations
  Clone ID: LIB3149-006-Q1-K1-B11.pep
AGVGSFCPASCVPFGFLSGLVRFFCWPFPLLLFVWFSPFGSSSSLVGAPXAVSRVSPVXCLASSVAGWGASAPVSPGVPXFPGRVGRPGFS

SEQ ID NO: 111016 - protein, 36 aa, Gossypium hirsutum
  unsure (1)..(36): unsure at all Xaa locations
  Clone ID: LIB3149-006-Q1-K1-C1.pep
GNHVTSFNNDRKCNSSANTSSIQFTKKISRKSXXVX

SEQ ID NO: 111017 - protein, 56 aa, Gossypium hirsutum
  unsure (1)..(56): unsure at all Xaa locations
  Clone ID: LIB3149-006-Q1-K1-E10.pep
SFCFFFFFLNDSPPLSTYHSNPIISVKFQNCPPIAVISLHPLLALLVSVKFXSPRX

SEQ ID NO: 111018 - protein, 76 aa, Gossypium hirsutum
  Clone ID: LIB3149-006-Q1-K1-F7.pep
TLPSVSVHCRSSPLASRASCGIRTMVQFPRCSFPFTTCFRRLNLTKLACYLPDPSICPGSNARALHSTKKTSCHKS

SEQ ID NO: 111019 - protein, 50 aa, Gossypium hirsutum
  Clone ID: LIB3149-006-Q1-K1-G10.pep
PAPLTKQSPSFLSTDVTKYSQPINVTLPLTLRVYEIKINKSLNNRNGELF

SEQ ID NO: 111020 - protein, 78 aa, Gossypium hirsutum
  Clone ID: LIB3149-007-Q1-K1-D1.pep
MLEKKIYDEECLKIDYSEKYTLNKQLFESISKSLNEAETNKEIDDMDAKYTLNKLLSRFNIICTIYNLCFLDSFGWRC

SEQ ID NO: 111021 - protein, 53 aa, Gossypium hirsutum
  unsure (1)..(53): unsure at all Xaa locations
  Clone ID: LIB3149-007-Q1-K1-E6.pep
RKPVDIAQPSGQENLVTRARSILRDTDXVEELSEPGLGGEDPKEDFIRVCTIA

SEQ ID NO: 111022 - protein, 107 aa, Gossypium hirsutum
  unsure (1)..(107): unsure at all Xaa locations
  Clone ID: LIB3149-007-Q1-K1-F8.pep
QARPAREPAELQGDKRSKTMTGLHEACEKWGYLQGDSQGGDKKXMEKAKEKVNGDYDENQKEKGYEPERTKRRNKKEKSYDMERERTFVIRHRPKANKKQNPNETKQ

SEQ ID NO: 111023 - protein, 78 aa, Gossypium hirsutum
  Clone ID: LIB3149-007-Q1-K1-F9.pep
AFVSAFNCAFRPHVSRPFLVSIPLLFLPTSSLAYLFSSPSSVVSPPMVRSSSAPPLASPLLISPPVSLGYAWFPFFHI

SEQ ID NO: 111024 - protein, 89 aa, Gossypium hirsutum
  Clone ID: LIB3149-008-Q1-K1-F4.pep
FSLGLPSFSHSFSFHHFSCSLDQPYFPSIKSLFIRFGVVLHNFISCEHVSPLCIACFLYNSRHSFHRCDLCLFVHKTPPYFHFSDIWHG

SEQ ID NO: 111025 - protein, 132 aa, Gossypium hirsutum
  Clone ID: LIB3149-013-Q1-K1-A7.pep
DARQKYTLVKRTHRGYGDQRVCHATSWIPGYSPSAAISEIQPSPCTTSSEEITTSRFPDMSALVGAQKPASMSIPQTDISMPEASEMPEMVQESIVDIPAENYVESETGNGGFIDPSTLVVNGSIPFQLDDL

SEQ ID NO: 111026 - protein, 51 aa, Gossypium hirsutum
  Clone ID: LIB3149-013-Q1-K1-D2.pep
TSPGLTPDRGLQVKVSNSTMLSVYRLRDLSHISAHLPADVQRIYLTDGSFR

SEQ ID NO: 111027 - protein, 33 aa, Gossypium hirsutum
  Clone ID: LIB3582-002-P1-K1-H6.pep
VTALSFQSLCCKAPSSEFNLRYTIEHLSRGMHG

SEQ ID NO: 111028 - protein, 70 aa, Gossypium hirsutum
  Clone ID: LIB3582-008-P1-K1-C7.pep
TRPVCGTLSAEDGQYASAPITRQALALVAFACLRYYLDTYDGSPCQALERGLTLGLRVSAVRNLEPKKLD

SEQ ID NO: 111029 - protein, 110 aa, Gossypium hirsutum
  unsure (1)..(110): unsure at all Xaa locations
  Clone ID: LIB3582-010-P1-K1-G3.pep
MRRIGSRIVTPMANALHGVEHENDCETHVNTQVNHLAVHSCCDSXQASTEGRTERPCKQKGKRNAQWDAPXSAALIAATLMVTRTVTSTLASALSAVSSAFFATFVGTFG

SEQ ID NO: 111030 - protein, 37 aa, Gossypium hirsutum
  Clone ID: LIB3582-012-P1-K1-A3.pep
SCMLHHTSFIVSANCNPLIASTQRFDCYNPVVAKLNL

SEQ ID NO: 111031 - protein, 41 aa, Gossypium hirsutum
  Clone ID: LIB3582-020-P1-K1-A3.pep
SYTYTYMCMYRSMYVNVYCSKRHLYLKRPFHFIFWKRDQYD

SEQ ID NO: 111032 - protein, 54 aa, Gossypium hirsutum
  Clone ID: LIB3582-029-P1-K1-E7.pep
AFACFNVLFSTFFFFFFFSYHGIKSITMFIHILQNKKIPKSGNPETPPDKGRSR

SEQ ID NO: 111033 - protein, 50 aa, Gossypium hirsutum
  Clone ID: LIB3582-029-P1-K1-G12.pep
ASPLQYGGCGAISHESAVVSEFYNAGGCFSDTSALLLDAPKNKIPCSMHV

SEQ ID NO: 111034 - protein, 53 aa, Gossypium hirsutum
  Clone ID: LIB3582-045-P1-K1-F11.pep
MQAHSWAIASPRFTGLPVFLQHVDCGNPGGTHVNRLGTHPLWASWRCSAEART

SEQ ID NO: 111035 - protein, 83 aa, Gossypium hirsutum
  Clone ID: LIB3582-052-P1-K1-A9.pep
LNLLQIHLGGASLITNKHAPTDLPNKHSPRLNNETHPPSTHSSSPVCVVLTPRPTHTPATYLPLLPFSSFPFFLPTSAFFPKQ

SEQ ID NO: 111036 - protein, 105 aa, Gossypium hirsutum
  unsure (1)..(105): unsure at all Xaa locations
  Clone ID: LIB3582-055-P1-K1-D3.pep
XKPNCLNNLFVPYFFFMLLQCMNECHFLSHSFQAPHLFLNKCFDLKKKKKKKKKKKKKKKKKKKKKKKKKKKKKKKKKKKKKKKGGPLLKDQSLLPRACNVIVFF

SEQ ID NO: 111037 - protein, 154 aa, Gossypium hirsutum
  unsure (1)..(154): unsure at all Xaa locations
  Clone ID: LIB3582-059-P1-K1-H7.pep
NYESESCCCSSKMAAAQVMGGASSPLPXEKTTNVLLQHQTDAQRAAALMYGEETCKFSQGRAERNDYFSMGLEEKANSASKQIYLTFPADSTFKDEDVLNYFSMFGPVQDVRIPYQQKRMFGFVTFVHPETVKLILSRGNTHFICDXRVLVKPY

SEQ ID NO: 111038 - protein, 113 aa, Gossypium hirsutum
  Clone ID: LIB3582-060-P1-K1-G2.pep
PKRRKSKKKSYFSSSLFAAALCVFFAGTESAGIVRRCGRGVRGLCAGAVGGVVWRDVVRPLVRAAAQGDPCLRVCKNWAQFLGCLGYWAMSFCKWTCNLGLGSLGLIWFDFGL

SEQ ID NO: 111039 - protein, 64 aa, Gossypium hirsutum
  Clone ID: LIB3582-062-P1-K1-H12.pep
LLPRLYCQLHSPFTCLITASCVAVTLSLTDSLAISIYLTPLDMLPAFDQMYADFSHKVYIICSL

SEQ ID NO: 111040 - protein, 49 aa, Gossypium hirsutum
  Clone ID: LIB3582-062-P1-K1-H7.pep
AHAAKAIGYSVIYNEDTNAGIKHSTAGKNLASTNHILYYNRPVASAAVQ

SEQ ID NO: 111041 - protein, 48 aa, Gossypium hirsutum
  Clone ID: LIB3196-010-P1-M1-G3.pep
AGQAGQPVVAGCRACLTNRPQNKMVLKLPKIRFKIRPKWVRRKSGTRR

SEQ ID NO: 111042 - protein, 67 aa, Gossypium hirsutum
  Clone ID: LIB3196-028-P1-M1-A1.pep
EYLQGVGALPVDVQARRFVQGFVGAYKSSNKISGSASPRSFRGRMFPRRRASRKLCSGSSLILCKLL

SEQ ID NO: 111043 - protein, 50 aa, Gossypium hirsutum
  Clone ID: LIB3196-032-P1-M1-F5.pep
MLPLLHIVRSLSTTLVTWIASDVPLIIPVIIGVRTILLSVSPSGYLCGRV

SEQ ID NO: 111044 - protein, 61 aa, Gossypium hirsutum
  Clone ID: LIB3196-034-P1-M1-G5.pep
CFRFHLAGTDVTLLLCFVPFTALLYPLPALVLWDFMCQFVNYIQQVSVQGTCATLTAISVD

SEQ ID NO: 111045 - protein, 72 aa, Gossypium hirsutum
  Clone ID: LIB3272-058-P1-K1-A1.pep
QSKRQRRVVNALMSFKITAVIGGSSCYIPSSLNKGKRYCMNHAALVCDCNANSLINFGFLKKKKKKGRPLAI

SEQ ID NO: 111046 - protein, 127 aa, Gossypium hirsutum
  unsure (1)..(127): unsure at all Xaa locations
  Clone ID: LIB3272-019-P1-K1-D9.pep
RRKSGVVLAKRKHEVSTSXSPSQGYLRAFAEDLDXLLPKVAPQAIKSVERLEGDGGPGTIKKITFAEGYGFSYAKHRVDVLDKDNLLYTYVVIESDFFNNMVEKISYETKFVAAADGGTSIKVNTTF

SEQ ID NO: 111047 - protein, 48 aa, Gossypium hirsutum
  Clone ID: LIB3272-026-P1-K1-A3.pep
GGSTLTRIIFKCSLSNRPFLIHPALPFWEPQELGKPKCNQIFWEHAQK

SEQ ID NO: 111048 - protein, 40 aa, Gossypium hirsutum
  Clone ID: LIB3272-031-P1-K1-C7.pep
TFRSGTPELHPSRSFPYYSNYSKSFTQFFYGGHPPWLYCE

SEQ ID NO: 111049 - protein, 75 aa, Gossypium hirsutum
  Clone ID: LIB3272-044-P1-K1-H1.pep
VPEPTLISFENGCFMVSLKHRKGIGLCQNLEGEKLSHWLNEEGKLGRFAMKWQTTVNWYRAFWFKPNEWAPPGIP

SEQ ID NO: 111050 - protein, 57 aa, Gossypium hirsutum
  Clone ID: LIB3272-054-P1-K1-H10.pep
VWIWSHSLTHLRPYPNLYPLILELECDCKKECELLRTLHFPLGDTISIVCRGMHAHV

SEQ ID NO: 111051 - protein, 50 aa, Gossypium hirsutum
  Clone ID: uC-gsronu33B002a02b1.pep
IALLFLIDCRNFYANATLRYKKMDMGKYVLLRFCNPYRPFLTNATFLCHM

SEQ ID NO: 111052 - protein, 83 aa, Gossypium hirsutum
  Clone ID: uC-gsronu33B002a07b1.pep
FRLKEAGSAPRGRCKLQSSKRPYRDQGICLQHMRGRQHMKWADLYQSGEGTPREPFKVTSTGTTSREVPQKQIEVVKETELKP

SEQ ID NO: 111053 - protein, 55 aa, Gossypium hirsutum
  Clone ID: uC-gsronu33B002b01b1.pep
LLNYSNLGLKAPTGNTCQPQILSSQSEFRRNFFNLSPIGTSLFSENSRWKNSDET

SEQ ID NO: 111054 - protein, 78 aa, Gossypium hirsutum
  Clone ID: uC-gsronu33B002c04b1.pep
SLRLMINSIPLGLTSLGIEPAGQADRRSQKLVGNRQLQIVCMLCVHSVEHKDGCRLETTPWVPTHPTYIEHYQALLWP

SEQ ID NO: 111055 - protein, 107 aa, Gossypium hirsutum
  Clone ID: uC-gsronu33B002e02b1.pep
ESERARRLFLNATLSSWTKEGAEEALAAESHKGALAEGESHVDRKGIEKLLKTYCCIVTTVKSGARALQKLEMEEEKGCRKTTGKNVNRIMTVDSRPRMTGYKHPDE

SEQ ID NO: 111056 - protein, 139 aa, Gossypium hirsutum
  unsure (1)..(139): unsure at all Xaa locations
  Clone ID: uC-gsronu33B002f09b1.pep
GCFCFYTLSPQGASDIVPAPYTSSEPAKEQPLVSKHHIGPLLKGKITDKLTMDGTDSPTQRSIIGDYINMLELCRPTQDPGGAHXWKTTEKHKSGSSTLAVAKQMLLENYPLGKTPKNPHLPVGAGKFNVQPPVSAILT

SEQ ID NO: 111057 - protein, 124 aa, Gossypium hirsutum
  Clone ID: uC-gsronu33B002g04b1.pep
STEDNSEKLQRAARERVERSNATPINNEDQHSAIELEENPRSITFQEKKMEEFEAEREKLMKSHQDRRLAITQRYWEELIELEEGFEKELTLLMGKYNPDRLEEETTDSLEGRDKREARDNETE

SEQ ID NO: 111058 - protein, 56 aa, Gossypium hirsutum
  Clone ID: uC-gsronu33B002g09b1.pep
NIEISLEINQEHPKCPKSDTKRYGVARGPRLSCQVTRNSYENPKQSDPKRNRKLKD

SEQ ID NO: 111059 - protein, 95 aa, Gossypium hirsutum
  Clone ID: uC-gsronu33B002g11b1.pep
IFINLGDHLEILSIGKYKSHIHQVILDNNEVNRISMATLHGPSLDTFVAPASRFIDESHPPAYRGMTYKESLEFNGSDEIDVQSSLSLLRIPFSL

SEQ ID NO: 111060 - protein, 101 aa, Gossypium hirsutum
  Clone ID: uC-gsronu33B002h08b1.pep
SVLLASFLNSVFDQTSSKMRKSKSTTQSMKDEEESPGGRRKRRISISHFRSSITADTKSVYSSSNSGSRTPPAYAHTPAKSYKDFRSYLDHKQHLAASSQT

SEQ ID NO: 111061 - protein, 134 aa, Gossypium hirsutum
  Clone ID: uC-gsronu33B002h09b1.pep
VFNLAYVELELGNPLKALSAARALLELPGCSRIYSCLGHVYLAEALCLLNKPKEAAEHLSIYLSGESNIELPFGLEDCEQWRVKKHIDCEEANVGAAAAKNSSPEGLEDFMLLKPDEARGTLYANLAAVSAIQG

SEQ ID NO: 111062 - protein, 46 aa, Gossypium hirsutum
  Clone ID: uC-gsronu33B002h12b1.pep
ISYLTDLNGSCSAINYNQEIRKLEKKKKKKTKKKKKKKKKKKKKNT

SEQ ID NO: 111063 - protein, 84 aa, Gossypium hirsutum
  unsure (1)..(84): unsure at all Xaa locations
  Clone ID: uC-gsronu33B004a08b1.pep
ARAHYTKEVRETLFEMHPTKAPGEDGFPALFYQKCXHFIGDEVVAFCLHLLNGEMEVSQISSTHIVLIPKIKNPSNMTHFRPIS

SEQ ID NO: 111064 - protein, 125 aa, Gossypium hirsutum
  Clone ID: uC-gsronu33B004c11b1.pep
WFFGRLLDISKFDSYNELRSELARMFGLEGQLEDPLRSGWQLVFVDRENDVLLLGDDPWPEFVNSVWCIKILSPQEVQQMGKRGLELLNSVPVQRLSNGSCDDYASQQDSRNLSSGIASVGSLDY

SEQ ID NO: 111065 - protein, 109 aa, Gossypium hirsutum
  Clone ID: uC-gsronu33B004d10b1.pep
MGNWRHRRPRRFDRQDIAPKYPPSYHVPESSFSEFSNDGVPLWEKKFCTLVGKVSWRKIVDAKNFTSHNNNVLNWDDSAGEEAFRNAKSQFWAKINGFSCDISAPDPNA

SEQ ID NO: 111066 - protein, 53 aa, Gossypium hirsutum
  Clone ID: uC-gsronu33B004e11b1.pep
TEVGLLKALLNFHHSCIFTFSYNLPYLTCSRFTADLSWADAGPEVAEPLVTRF

SEQ ID NO: 111067 - protein, 168 aa, Gossypium hirsutum
  Clone ID: uC-gsronu33B004e12b1.pep
SFLASTSKPKDIPYKLESPPLIPFTSNTTSTAPVAIVGATNINVYHVGSLESQSSAPGTSPGSIDVGDALEQPSSHCITRIKSLQQCASAITELVHEKTEAGKHLEAFSIQLVILAIWKQALHICHTQAASAMEGSPSQETSRLRSSTSKKLGTSDTRESSEDISSEI

SEQ ID NO: 111068 - protein, 22 aa, Gossypium hirsutum
  Clone ID: uC-gsronu33B004h10b1.pep
EGSFWEILVFLHRSALRPSPKP

SEQ ID NO: 111069 - protein, 60 aa, Gossypium hirsutum
  Clone ID: uC-gsronu33B005a04b1.pep
NGGKIDLAPEVRLEHGASSAMAQSVRAHTAMRSRLRVAIEGAIVVQRIFSVNRRKVFLFS

SEQ ID NO: 111070 - protein, 151 aa, Gossypium hirsutum
  unsure (1)..(151): unsure at all Xaa locations
  Clone ID: uC-gsronu33B005c05b1.pep
SSRPPTRPDSWLSGEDGGLSLRTLDRQQNGHVFKSPKMILLATNITNAELEKARAAGFADTTIMKPLRASMVAACLQQVLGTGKKRQPGRGMLYGSSVLGSLLCGKKILVVDDNMVNRRVAAGALKKXFGAAVECAESGKAALKLLNFQQF

SEQ ID NO: 111071 - protein, 66 aa, Gossypium hirsutum
  Clone ID: uC-gsronu33B005e08b1.pep
FSSFFLSLSWLFICFLFFWVRKTKVKRKRRGSYQCWRAVDALTMLRLNRRLKGDPRREEQGRRTHG

SEQ ID NO: 111072 - protein, 78 aa, Gossypium hirsutum
  Clone ID: uC-gsronu33B005f09b1.pep
VNVNPNQTTVFFNSMSPLHIKSLDWNNPNGIKCALETTPILNQSMYLDVGTDRRLLVIANNITQNMNVKVHFVNITSL

SEQ ID NO: 111073 - protein, 68 aa, Gossypium hirsutum
  Clone ID: uC-gsronu33B005f11b1.pep
PLVRLADWAIDCFPNILVPLDNYISRGTAHFLTSTAPDYQQSLWNMISSIMADKNLEDYDSAPDLKLM

SEQ ID NO: 111074 - protein, 124 aa, Gossypium hirsutum
  unsure (1)..(124): unsure at all Xaa locations
  Clone ID: uC-gsronu33B007b10b1.pep
SISAKTGTFTVPDNVTLDQYIDLAKIADQAERYXEMVHSMHKLDLGSTPACXLTVXELNLLSSAYKNVIGSLRAVRMMRAPIEHNEDGMKNEXHAGLAXEYRSKVESEWPAVCTSLLTVLDSNL

SEQ ID NO: 111075 - protein, 49 aa, Gossypium hirsutum
  Clone ID: uC-gsronu33B007b11b1.pep
SRQTRKDQIIVGVLNPPNKHSTGTFYKFDQFSNIANQYELHKELVCFYK

SEQ ID NO: 111076 - protein, 71 aa, Gossypium hirsutum
  Clone ID: uC-gsronu33B007e06b1.pep
TRPRFRKNLERPNDYAIYGQLSHKPLAKEGATVIPPQGQTQGTPTAHRLLDNQLSQSVNRALKRATKVTWT

SEQ ID NO: 111077 - protein, 50 aa, Gossypium hirsutum
  Clone ID: uC-gsronu33B007g09b1.pep
FSLQDEQVCLPCSVARVVGERPRLVVIWWVMAPPWFVKAHLLRRDFADAR

SEQ ID NO: 111078 - protein, 86 aa, Gossypium hirsutum
  Clone ID: uC-gsronu33B007g10b1.pep
MRPVSMELVVPCNSCTSLHRKPPLHQRVSSLKRSAFSLKCRRTTTSELQSPVSVTSLDGSLSPSIPSHKVTVHDRFRGVVLDFAVP

SEQ ID NO: 111079 - protein, 93 aa, Gossypium hirsutum
  Clone ID: uC-gsronu33B007h06b1.pep
LVQAVDAAIQHYEASIHKRIAQSGQRPNLYQLRTNLSLPRKDCHEFPALENKSLMFWHFDPNSFVFSALLCVLCLCSCLAHCFNNLAVELHQL

SEQ ID NO: 111080 - protein, 42 aa, Gossypium hirsutum
  Clone ID: uC-gsronu33B007h09b1.pep
VLLKHRNVFGIRKRKNMVAKSITITETNSGSTISAQTKLTPI

SEQ ID NO: 111081 - protein, 64 aa, Gossypium hirsutum
  Clone ID: uC-gsronu33B008a04b1.pep
PPIKSFPYSINLRKTLKNSLVISEQDLLYYLQNAPSQNPKSTTFHTQLDSSAFFQPEDIKNQGG

SEQ ID NO: 111082 - protein, 66 aa, Gossypium hirsutum
  Clone ID: uC-gsronu33B008a07b1.pep
MRAMRSMHIRQAGIQVGNSCWEPYCLEHESQPEGLMPSDTREGVANDGSNTVVSATVSRIQCAWAV

SEQ ID NO: 111083 - protein, 96 aa, Gossypium hirsutum
  Clone ID: uC-gsronu33B008b02b1.pep
IQGSVLGTLTEKGIKAVQLTTDLKPGLPSEAERIRNCKDRVLALKEEPHIPREWLSHEDSPGLAMSRAFGDFVLMDHGLIAEPDVFYHRLYPEEHF

SEQ ID NO: 111084 - protein, 87 aa, Gossypium hirsutum
  Clone ID: uC-gsronu33B008b06b1.pep
LVISSDLPLSILIVGVGGADFKEMEILDADKGERLESSTGRVASRDIVQFVPFRDVQNGPSVVQELLAELPSQFLAYMRSIEIKPCS

SEQ ID NO: 111085 - protein, 96 aa, Gossypium hirsutum
  unsure (1)..(96): unsure at all Xaa locations
  Clone ID: uC-gsronu33B008d05b1.pep
IVFGSTKGSAGRALLSALFLLLVNRIPGSILLTLLVRAWSPHXXPSRFLACYPMSSGLSRTMACNQHLLLCWSLFSFPLWHVCHVLINPPSDSVCS

SEQ ID NO: 111086 - protein, 127 aa, Gossypium hirsutum
  Clone ID: uC-gsronu33B008f06b1.pep
YGFFGCQSPLHASSQTFSSSCSAPFKLLSRLGVPSFRSGGGCSQHCRLRRSRSACPHVTTRTFVFCGGFFARSVGFDFALGFSAFVLSEWMVRGPAHDCSFDTPPIFFWILKRRKPGGLTRNWEFRS

SEQ ID NO: 111087 - protein, 61 aa, Gossypium hirsutum
  Clone ID: uC-gsronu33B008g06b1.pep
SDMPTITSPIKTEPGYRVVLFQVAWNSVVIVVSSTYIASGNRNQIPACSLSASASSGVSLV

SEQ ID NO: 111088 - protein, 110 aa, Gossypium hirsutum
  Clone ID: uC-gsronu33B008h01b1.pep
HFLFKKTKKKKGGVVLEKKVDKIEKERLKREVWLVGFPSSYFFDPSHGGVPPGGSCLLPPLSCSLFLFFLSPWCTFVAGLSSRASFETPGLADFLVVRLPRPFFAWWVCV

SEQ ID NO: 111089 - protein, 163 aa, Gossypium hirsutum
  Clone ID: uC-gsronu33B008h11b1.pep
MAYHRLPFFVLPFLLITLSLMSSNTVLVGARRLLETSVPEIPKPELPEMPSFPKVELPKPEMPEIPKPEIPKMPELPKPELPKVPELPKPELPKVLEFSKVPELPKPELPKVPEFSKVPELPKPEFPKIPELKKPEEVKVPEMPNAPKCQNLKHQKFRVTKSR

SEQ ID NO: 111090 - protein, 144 aa, Gossypium hirsutum
  Clone ID: uC-gsronu33B009a06b1.pep
LRQDGGVFVVLSTEQSRSDEELLEMSRSWDIVGIDLISGVTCNAPYEWVDKTKSDWDFNSNGRDQETYRVVAYDFGIKHNILRRLASYGCKITVVPSTWPAAETLKVKPDGVLFSNGLGDPSAVPYAVETVKEILGKAPVFGIC

SEQ ID NO: 111091 - protein, 37 aa, Gossypium hirsutum
  Clone ID: uC-gsronu33B009a10b1.pep
PYPIASFDYESFAVAQTLRALWVLCGLYPTATKMMLQ

SEQ ID NO: 111092 - protein, 85 aa, Gossypium hirsutum
  Clone ID: uC-gsronu33B009d04b1.pep
IMSLRTTRTLCSSVSTFNVDNVSLHNSIDRWVKTGQAIDAIAEQTDEQAGHVIGLDEPKEYRIELGSEHNIQVFVQRKVYSVQCR

SEQ ID NO: 111093 - protein, 59 aa, Gossypium hirsutum
  Clone ID: uC-gsronu33B009e05b1.pep
MPPRNPTFFSESENISQLLSHIKLLIRRRTAAIAALDAGFFFEAISHFSKIADSLLPVP

SEQ ID NO: 111094 - protein, 64 aa, Gossypium hirsutum
  Clone ID: uC-gsronu33B009e09b1.pep
PIRGKRRATTTKRERLACGGALLRNQDTGPLLRSFRRSCGPPLIYSRAAASTPWDRENPWSSQA

SEQ ID NO: 111095 - protein, 36 aa, Gossypium hirsutum
  Clone ID: uC-gsronu33B009g05b1.pep
QDITPLLNSLWLWDTVVSLARLYDLAFGLNDIASCG

SEQ ID NO: 111096 - protein, 50 aa, Gossypium hirsutum
  Clone ID: uC-gsronu33B009g11b1.pep
SLEFLYKQSQSMTAWDREEQQVNVGDGGLEGVTDGVHAFNHKLGMLQMLS

SEQ ID NO: 111097 - protein, 67 aa, Gossypium hirsutum
  Clone ID: uC-gsronu33B009g12b1.pep
EGSEMQFSKKPGSKTKVTPKKSENFDFSLEKFSSSFVLILIYSSFCNSDSIQEIIFFSCNSNFEIFK

SEQ ID NO: 111098 - protein, 58 aa, Gossypium hirsutum
  unsure (1)..(58): unsure at all Xaa locations
  Clone ID: uC-gsronu33B009h07b1.pep
GIGDLKGDFIGDFGWWNGGVLEDKMFCLGFIFLPSRLARLVHRAMNEISHPPPKXXSV

SEQ ID NO: 111099 - protein, 40 aa, Gossypium hirsutum
  Clone ID: uC-gsronu33B011a04b1.pep
DLWFASSPSRISSEIRLATRIYPVLKAALRQTERRVPIRV

SEQ ID NO: 111100 - protein, 73 aa, Gossypium hirsutum
  Clone ID: uC-gsronu33B011a12b1.pep
ALIFRPWVRPSLLTPQNHGYVYDFCCRNVSHSKCRSLAIGTGELGAHIQSFPVFHGGPIRALPFISTPCSTDE

SEQ ID NO: 111101 - protein, 40 aa, Gossypium hirsutum
  Clone ID: uC-gsronu33B011b05b1.pep
IKYSSKYAIIPVIENKMSSVVYGAETVMQTNYPQRRSQKT

SEQ ID NO: 111102 - protein, 46 aa, Gossypium hirsutum
  Clone ID: uC-gsronu33B011c09b1.pep
PMYKSEDIQVMINRGLMRGKEGRPRSGFSNRYLHTNPRAWPLIPNR

SEQ ID NO: 111103 - protein, 46 aa, Gossypium hirsutum
  Clone ID: uC-gsronu33B011d02b1.pep
EFFYLCSFQTRKNDVLNQLTWVGSWFVHVLKVPLQRLGLVRFYHLM

SEQ ID NO: 111104 - protein, 137 aa, Gossypium hirsutum
  unsure (1)..(137): unsure at all Xaa locations
  Clone ID: uC-gsronu33B011d06b1.pep
MTVELKMVYGGDGGGSFARKVAETALKEAANSGIQGVEELITLMSKNQELFNPDVSIKTAAPSGSAESAMDIQAVTDKTVNXFKEVISLLDRPRIGHARFRRAPVLDPNQDTEQASKKIQEPETGVFFFSSNQRSSV

SEQ ID NO: 111105 - protein, 104 aa, Gossypium hirsutum
  Clone ID: uC-gsronu33B011e08b1.pep
GLVGYMRQNDDGKTVAAMDMLVPRVGELIGGSRREERLDYLENRLDELKLSKESYWWYLDLRRYGSVPHAGFGLGFERLVQFATGIENIRDAIPFPRAPGSAEF

SEQ ID NO: 111106 - protein, 91 aa, Gossypium hirsutum
  unsure (1)..(91): unsure at all Xaa locations
  Clone ID: uC-gsronu33B011f01b1.pep
MGDAGSKLLKAGHAVPDQAPSLIMPTQMKRMLEDGSSADNSLLEDVTIDPVVRGCVKDWDAMEDLLHHVLYTGPEWKXGNEGQILFTAPFC

SEQ ID NO: 111107 - protein, 64 aa, Gossypium hirsutum
  Clone ID: uC-gsronu33B011f05b1.pep
SFIRICLHCLIGSCCALGRCKNNMLLYAYPFCFSSFVARHLPLLDVSLLWNYIGFQILNTSVIY

SEQ ID NO: 111108 - protein, 77 aa, Gossypium hirsutum
  Clone ID: uC-gsronu33B011f07b1.pep
CCLSGNGLRVATGSYSNLFRVFGCSEGSTEATTLEASKNPMRRQGQATSRPSRSLGNLSGVVRRGLCFTSLLIRNLK

SEQ ID NO: 111109 - protein, 52 aa, Gossypium hirsutum
  Clone ID: uC-gsronu33B011h11b1.pep
SNVSSLLVKKAILFCEFIGSRQHYTTVVLEGMQLERMSCVRGKRNASIGQLK

SEQ ID NO: 111110 - protein, 56 aa, Gossypium hirsutum
  Clone ID: uC-gsronu33B012a06b1.pep
IALLIKSLQVKLHLQRFVHAYNSCKNDEFNDEFNLSQKGESAPMTPFPVCRHQNGN

SEQ ID NO: 111111 - protein, 165 aa, Gossypium hirsutum
  Clone ID: uC-gsronu33B012a07b1.pep
LQLPFQACLKIEKFGDLILKATEPQMVLFNIYDDWLKSISSYTAFSRLILILRALHVNNEKAKMLLKPDKTIVTEPHHIWPSLTDDQWMKVVVALRDLILSDYAKKNNVNTSALTQSEIRDIILGAEITPPSQQRQHIAEIEKQAKDASQLTAVTTRTTNVHGDE

SEQ ID NO: 111112 - protein, 85 aa, Gossypium hirsutum
  Clone ID: uC-gsronu33B012b02b1.pep
SKVQIFTCFSVQCQPFCYLRIYCHYFIFHVSKSVRFLMYEKQLVFRFRLVEYISVAPARFISFYFTGKAQYQIICVIYILKLVRS

SEQ ID NO: 111113 - protein, 102 aa, Gossypium hirsutum
  Clone ID: uC-gsronu33B012b04b1.pep
SPPSFHSQNSRNRQRTKNLYRKFQKKKKKNRPLTLNTERQEQEYDCHCSRRLIYRNLKTHYRGLNLAYLMPSTRKIHARTIQKRTAKLWPFLTDIHNLKLQK

SEQ ID NO: 111114 - protein, 131 aa, Gossypium hirsutum
  unsure (1)..(131): unsure at all Xaa locations
  Clone ID: uC-gsronu33B012b10b1.pep
KKQNSHSSYWKIGGPPFEAPNFPPPPGDPHLFFLGGPLISFPCRGFSTPFPGGNPWLPPLGSPPGPSPLFSGWGIGPXPPPVGLSKRRPPLFFNGPPPRWGSFGPPPSGVPPPRMGFFFPPPNPPLFPWPL

SEQ ID NO: 111115 - protein, 93 aa, Gossypium hirsutum
  Clone ID: uC-gsronu33B012e12b1.pep
TSAIFCYAIILLNNHYVHPTWIGEKVITANKIELFLSIYDLVYSAATLYKIPSKVYIYRYMCVRAKLTLVRYICIYIFSSTSRVKQLHSCFAK

SEQ ID NO: 111116 - protein, 74 aa, Gossypium hirsutum
  Clone ID: uC-gsronu33B012f01b1.pep
TKSPKNETKLIIYHKGPNITTNIDTQCPIAQIQRPNSWNRPKRPQKLSQVSANPKSPLSIAQLLLRRRRERTRG

SEQ ID NO: 111117 - protein, 106 aa, Gossypium hirsutum
  Clone ID: uC-gsronu33B012f06b1.pep
SVDQVGLGPWVSLLTGGYGENSQVSGKVTFISILEEPSICHKLTGLCSLMFHDALVVNCEALLHGVIFDKYDSSIIFVSSRFKQISKASIHVHFVIVITIIVIIVI

SEQ ID NO: 111118 - protein, 68 aa, Gossypium hirsutum
  Clone ID: uC-gsronu33B012f09b1.pep
LIGSPKILALGSCPCSSLTPRTVHTIRSSDPDSHYSSGSHSIEAVFFCKVVDSTDHLLDHADSHLVNI

SEQ ID NO: 111119 - protein, 131 aa, Gossypium hirsutum
  Clone ID: uC-gsronu33B012g07b1.pep
MGDINENFSETETSQITQNINQGITQGEINSSLIITNHRLNGKNFLQWSQSVLMVIRGRGKLGYINGEIPRPTMADPTYATWELNNSIVMAWLINSMEGHISRTYLFFKTQFHPCPQFPYLDSAFALHHCL

SEQ ID NO: 111120 - protein, 48 aa, Gossypium hirsutum
  Clone ID: uC-gsronu33B012g09b1.pep
SSVSKNPDSIPFVFIGANTILRTRFSRWKRRDVQFDCSNLLFNVQLKP

SEQ ID NO: 111121 - protein, 86 aa, Gossypium hirsutum
  Clone ID: uC-gsronu33B012h08b1.pep
RSRVRPRVREHAVTVLWSVCCLFREEKAQEAVVGCSNGLTKFLLLMQSDCSSATRQMSADLLKLSRLNSNSCLSSYDTKTTHIMPC

SEQ ID NO: 111122 - protein, 76 aa, Gossypium hirsutum
  Clone ID: uC-gsronu33B014a06b1.pep
PVVDVPLAGVSLPCLALIVSTPTEIFGVYNTAFKWPHAFAAFTMPPTKTGVEATIEAPQSSQVLLKQSLGYSLTSS

SEQ ID NO: 111123 - protein, 50 aa, Gossypium hirsutum
  Clone ID: uC-gsronu33B014a12b1.pep
LTISTKFSTHNNLTSKFGGSALKISGRVLQGSKIFGSESLEIKTRVGGRV

SEQ ID NO: 111124 - protein, 94 aa, Gossypium hirsutum
  Clone ID: uC-gsronu33B014b11b1.pep
VLFSVPAMLVALANCQESLKPLVKMVKGMKLFDKGWQCYGMHVMLHCCWTSQEGACLTMDTDWSFWPKEFSGTLETHLRSLLKGIVLEFVFVLI

SEQ ID NO: 111125 - protein, 45 aa, Gossypium hirsutum
  unsure (1)..(45): unsure at all Xaa locations
  Clone ID: uC-gsronu33B014c09b1.pep
IDQTRGALEKDAXYQSIVSKLSYGDSQKLDKACYEEEVKRPCLAF

SEQ ID NO: 111126 - protein, 44 aa, Gossypium hirsutum
  unsure (1)..(44): unsure at all Xaa locations
  Clone ID: uC-gsronu33B014d09b1.pep
RFLRVRKSSETVVSMASKQTPTSASPCGKSPTVSDPSXSKILRR

SEQ ID NO: 111127 - protein, 81 aa, Gossypium hirsutum
  Clone ID: uC-gsronu33B014e05b1.pep
PPQASKTLEDETHGDIIKRGNLVRNKERSVKRRQRLVGPNSSTLKALEILTSCYILVQGNTVAAMGSFKGLKQVRRIVEDL

SEQ ID NO: 111128 - protein, 130 aa, Gossypium hirsutum
  unsure (1)..(130): unsure at all Xaa locations
  Clone ID: uC-gsronu33B014f12b1.pep
KCVKKSNISKVHAYHFHEKGKHSEFICSLVILGIAEYHRALQKWSRTNIDRVSKKKTKKGSIGGREVLEDHHIPPFQVDVPRIVAHGLGPSAITHVHHQVLIDIAFISIQGFILPFXGMQRLFSILPSXN

SEQ ID NO: 111129 - protein, 44 aa, Gossypium hirsutum
  Clone ID: uC-gsronu33B015a04b1.pep
SRSRAPPFPFYHFSLFINIQSFGVSLCLLSGCTDFSHCVQCKSL

SEQ ID NO: 111130 - protein, 160 aa, Gossypium hirsutum
  unsure (1)..(160): unsure at all Xaa locations
  Clone ID: uC-gsronu33B015b06b1.pep
GRAIAVKQLSAVSRQGKSQFVTEIATISAVQHRNLVKLYGCCIEAEQRLLVYEFLENKSLDQILFGKSLDLNWTTRYDICLGVARGLAYLHEESRVRIVHRDVKSSNILLDSDLTPKISDFXGLAKLYDDKKTHISTRVAGTIGYLAPEYAMRGHLTEKD

SEQ ID NO: 111131 - protein, 91 aa, Gossypium hirsutum
  Clone ID: uC-gsronu33B015c06b1.pep
WPKVNPSPQHVFNSNGSINCRSRRSHVLHLQQRPHHPTFSDSSHPSCMFIQKRRAVDIFNSLRLNRSWKGGVRLEKQRRGWSSSDAWANAW

SEQ ID NO: 111132 - protein, 36 aa, Gossypium hirsutum
  Clone ID: uC-gsronu33B015c09b1.pep
ILIRGVTTPPTTMTPPPAMTPMSAPAPSIPMASTPS

SEQ ID NO: 111133 - protein, 192 aa, Gossypium hirsutum
  Clone ID: uC-gsronu33B015d04b1.pep
HHAIFAEHSSSATHPCQYIAYFGPTIHPSSSNSSGSISDSSSFNGHWNGPSVPSEIPPSYAFPAMNLHYQGWEHHSPPFSTSNRRIGGSGQPSIPPVSQRSARNSSDMPSLGTFMHPFVASHSSGTRIASAVASSFIPPYPGSNARARDRVQALQAYYQHHHPSTLPALRTPVSGSRGWAAIEVMVMVMDMV

SEQ ID NO: 111134 - protein, 55 aa, Gossypium hirsutum
  Clone ID: uC-gsronu33B015e06b1.pep
PFVRSSYGASIKTKKKKHGKPHRILLLIYIGYYCLINKLDVLSVWGFCFLYYLLS

SEQ ID NO: 111135 - protein, 151 aa, Gossypium hirsutum
  unsure (1)..(151): unsure at all Xaa locations
  Clone ID: uC-gsronu33B015e07b1.pep
PLVRPRVRDVEGTDGGDGSSGEGVIDFHLPLDDDVEQNNSGGGEEWDCNFQNLEPPPANVLAGMSSGFSGDFFNDSSPKCLTGSCDGSSQLNQWSSVTEASSGRSVTLHSESTGVKGSIRFQTSSPVSVLEAVVLALLQTRYLLTXNSVSW

SEQ ID NO: 111136 - protein, 181 aa, Gossypium hirsutum
  Clone ID: uC-gsronu33B015f02b1.pep
VHCCILKVIIDRFTVELTSRSSDLIDHHNRYKKPKDLHYDNEAELKDIRKEEDAKKRNSRQRTYMKRIIVHPSFHNIDFRKAEKILSDGEQGEAIIRPSSKGNDHLTLSWKVYDGIHQHVDIREEGKNNVFSLGQQLFIGNETFEDLDEIIARYVQPMAGFARDMTSFQYFRDLNGDRSAA

SEQ ID NO: 111137 - protein, 45 aa, Gossypium hirsutum
  Clone ID: uC-gsronu33B015g01b1.pep
EKRIKIAKIISTQSCKRVLLVKHLVTFNYFLFMLHRKLNIQIQHL

SEQ ID NO: 111138 - protein, 141 aa, Gossypium hirsutum
  unsure (1)..(141): unsure at all Xaa locations
  Clone ID: uC-gsronu33B015g11b1.pep
NAQSGGSCIDELTAIAKLHSAELLKTLVKLQSQLEGFKYAYYNLYQSFTERLNNPSKYGFKDATTACCGSGPYGGVYSCGGKRGXEVYELCDKPGDHFFFDSYHPSEKAYRQFAELMWAGNTDIVWPYNLKMLFQDNAFYP

SEQ ID NO: 111139 - protein, 38 aa, Gossypium hirsutum
  Clone ID: uC-gsronu33B016a06b1.pep
CSVSESTSPRWRKGGFKKKKGMALSHGGDQHHRPRLRE

SEQ ID NO: 111140 - protein, 88 aa, Gossypium hirsutum
  Clone ID: uC-gsronu33B016b02b1.pep
QIRLELNLTLHLLYCRPRICLCKLHRSLQSSNHVVSVLGTTLEKPTNPQDIPKPSTSQFTKQTLEILLTGLHYEYKIKMELTKFRANP

SEQ ID NO: 111141 - protein, 65 aa, Gossypium hirsutum
  Clone ID: uC-gsronu33B016d02b1.pep
KGLVTLQFGEALDSWKNLTTNREIERDSLEKSKELCSHSPSFSLKTKGGGHQLHWSAEHQKPHPR

SEQ ID NO: 111142 - protein, 38 aa, Gossypium hirsutum
  Clone ID: uC-gsronu33B016d04b1.pep
PRVRVKELCVCKQNRMLFSSLSHHVCDWIDAIGMVYLM

SEQ ID NO: 111143 - protein, 58 aa, Gossypium hirsutum
  Clone ID: uC-gsronu33B016d12b1.pep
RSIPTPALLADCRCEAYHLRAYTPFNHYVHKHLCFLSMISFTQYFPHLIKYSYISLKP

SEQ ID NO: 111144 - protein, 133 aa, Gossypium hirsutum
  Clone ID: uC-gsronu33B016e02b1.pep
GVDLRTLVIKEAVRVTEAFTLCTFVDTYNSVPSFMRSLIFNGNGALAMSSAELQSMMELRDQVFRIWGLLRSSENFDPALLQPILQILQQPEARSLGGRVVGGITQRLAARLLQQVLRMPMAPTSSLSALDTR

SEQ ID NO: 111145 - protein, 87 aa, Gossypium hirsutum
  unsure (1)..(87): unsure at all Xaa locations
  Clone ID: uC-gsronu33B016f08b1.pep
IKKNKKKKGRPDIESNKINVTVRAGLRFSCLVPPTFXLAGPPFALSLGWLPPGWSPRSGLGVPSPFPSWRHSGLARSARPPYRLLGL

SEQ ID NO: 111146 - protein, 62 aa, Gossypium hirsutum
  Clone ID: uC-gsronu33B016g01b1.pep
ELGQTIARMTTIRHTKTKNNSAVGDLYFLKGLFPCKFSCYRLVMSKRITQFNGSFTSVTELM

SEQ ID NO: 111147 - protein, 69 aa, Gossypium hirsutum
  Clone ID: uC-gsronu33B016g07b1.pep
PHAALMKVLPLKKWNKQAKKPTKRFSLTRQRKKGTNGLRTGLSKQEGMSFLDRGWGRYLHRSIYRNRNE

SEQ ID NO: 111148 - protein, 137 aa, Gossypium hirsutum
  unsure (1)..(137): unsure at all Xaa locations
  Clone ID: uC-gsronu33B016h10b1.pep
NPEYSFIMSDNMASEARLLLQTQIKDHRKNPGDGFSDESMDENNNSEWSVTEIGPPDTVYERRLFNDMMSMTPKHPNRHPTERMTSEXWHPNRYTDGRGRISILDTPGDDPNGHQLAWERWMPVHTVKRIALSFISM

SEQ ID NO: 111149 - protein, 53 aa, Gossypium hirsutum
  Clone ID: uC-gsronu33B017b05b1.pep
GTSVSRPSSRRTPADFHLLYILCFPQAPEQWSALIIVLSAHNISRGALSLMLH

SEQ ID NO: 111150 - protein, 34 aa, Gossypium hirsutum
  Clone ID: uC-gsronu33B017b09b1.pep
FSSCSGLTKRKGCNYLVKYQRHDGSTNDLHHLII

SEQ ID NO: 111151 - protein, 105 aa, Gossypium hirsutum
  unsure (1)..(105): unsure at all Xaa locations
  Clone ID: uC-gsronu33B017c05b1.pep
YDNPLKKNRKKRGHYSAGHGRIGKHXKHPGGRGNAGGMHHHRILFDKYDPGYFGKVGMRYFHKLRNTFYXPIVNIGMLWPFVPHDANAKANQDAVPMIDVTHFGY

SEQ ID NO: 111152 - protein, 124 aa, Gossypium hirsutum
  unsure (1)..(124): unsure at all Xaa locations
  Clone ID: uC-gsronu33B017c08b1.pep
MASKRTASIALFSALNGLCFTLXSASGSCPSPNPKPKPTPXTDAPSGKRPQDTLKLGARAEELGPAKVTXATPPVQPCCSLFQGLADLEAEGRLCTVLIANVSSMTLNIPGFXLSLFLNVCSKK

SEQ ID NO: 111153 - protein, 84 aa, Gossypium hirsutum
  unsure (1)..(84): unsure at all Xaa locations
  Clone ID: uC-gsronu33B017d05b1.pep
QRTADLPDEYFMDEAGDIITEEALPTYQTXINTLXGVRDDTGASYKPWVICTLASTVEENKHGDFLKTFLYLSERVDMLMIERT

SEQ ID NO: 111154 - protein, 53 aa, Gossypium hirsutum
  Clone ID: uC-gsronu33B017d06b1.pep
WSRHSNPFLSHHYIGGRLGSCKVPVSGTNPGGSSGHAFLPNTSSNMKFDQTRA

SEQ ID NO: 111155 - protein, 157 aa, Gossypium hirsutum
  unsure (1)..(157): unsure at all Xaa locations
  Clone ID: uC-gsronu33B017d11b1.pep
MAKHSAEVVVEGLKKILLNVQEELDEKVQSKVEKLIAELQGREHHHRHHPPCDHDAQRLDDGFHFFKTHIFDKHRECFNELAKAQHPKFLVFACSDSRVSPSVVLNFKPGEAFVGRNIANMVPHFDRVRHTXIGLIIEYAVKVLRWTHIDMGHIVGW

SEQ ID NO: 111156 - protein, 48 aa, Gossypium hirsutum
  Clone ID: uC-gsronu33B017e04b1.pep
LLYITLHSVHFIVSCNSSQQKKSIEVSYNYHIFSREYTNGPVSKILCR

SEQ ID NO: 111157 - protein, 51 aa, Gossypium hirsutum
  Clone ID: uC-gsronu33B017e05b1.pep
MSHVVVGYEDCPGKDTEFLFPHRVYIVRPMIAMRSFNFLSNKALTISQEGC

SEQ ID NO: 111158 - protein, 42 aa, Gossypium hirsutum
  Clone ID: uC-gsronu33B017e07b1.pep
AFRATGRFLPILISTVHLPKKLRWPLFLYPIHQLATTSTVRE

SEQ ID NO: 111159 - protein, 109 aa, Gossypium hirsutum
  unsure (1)..(109): unsure at all Xaa locations
  Clone ID: uC-gsronu33B017g08b1.pep
FMRKDVMAKCAHLAQFDEELYKVTGEGDDKYLIATAEQPLCSYHVDDWIQSSELPIRYAVYSYCSRKEAGSHGIDAPGRFRAHQFEKVEXLCINSPNGNEFWDMLEEVI

SEQ ID NO: 111160 - protein, 125 aa, Gossypium hirsutum
  unsure (1)..(125): unsure at all Xaa locations
  Clone ID: uC-gsronu33B018b02b1.pep
NDGCLIERDIWDPQVTDPWQQLERFKAAFIREDSDSCSTLIDETKVLMTQXRSSSTVLENTRGWGHEMLLEWEHDEHAACLSVKIEDQDAFERDFLQLKPFYTDAGSRISPSEEEYLFLGLNLLR

SEQ ID NO: 111161 - protein, 127 aa, Gossypium hirsutum
  Clone ID: uC-gsronu33B018c08b1.pep
ISSKKVEDAKLARDFQNTLQEFQKVQQLASERESTYSPAPPPPSLPATYQSFTFNTIYVYVCMYVFEVFYRLDAFDAAALAPMSRCLKRNNVYLWNREGEFSSSFPFLPQTLLSLFLFPHLSCIEHQ

SEQ ID NO: 111162 - protein, 50 aa, Gossypium hirsutum
  Clone ID: uC-gsronu33B018c10b1.pep
KPPCFHLDFCYQQGYNIHPIWHHAGSCGAKEQGYSLVSSGFLWSQLIKTR

SEQ ID NO: 111163 - protein, 72 aa, Gossypium hirsutum
  unsure (1)..(72): unsure at all Xaa locations
  Clone ID: uC-gsronu33B018d07b1.pep
MGLRYKAGLFLIGTVVVIWVTSAEVTQDIFADYKQPFAVTYLGASLMVIYLPIAFXKDWVCNLLRRRSSKLL

SEQ ID NO: 111164 - protein, 175 aa, Gossypium hirsutum
  unsure (1)..(175): unsure at all Xaa locations
  Clone ID: uC-gsronu33B018d11b1.pep
YFLDLRKKYGSVLAIDLVNTTGGEGRLSEKFASAVQPILSDDLRYIHFDFHKIXGHVHFERLSILYDQIADFLDKNGYLLLNDKGEKMKEQLGVVRTNCIDCLDRTNVTQSMIGRKMLELQLRRIGVFAAEETISSHTNLDEKYKILWANHXDDVSIQYSGTSALKGEFVPYGSE

SEQ ID NO: 111165 - protein, 113 aa, Gossypium hirsutum
  Clone ID: uC-gsronu33B018f01b1.pep
VLQPSDKFLIFASDGLWEHLTNQQAVEIVSNSPRAGIARRLIKTALNEAARKREMRYDDLKKVDKGIRRFFHDDITVVVIFIDQESLSTKMPVPEQSVKGFADSIGPSNFNIL

SEQ ID NO: 111166 - protein, 44 aa, Gossypium hirsutum
  Clone ID: uC-gsronu33B018g09b1.pep
PVCPEPMYPLKDRSVYHSHCLDNSVSLLDISSRSRRFPSPDLFK

SEQ ID NO: 111167 - protein, 91 aa, Gossypium hirsutum
  Clone ID: uC-gsronu33B018h04b1.pep
WHNRIETQQLQLEGEVDAGDLLVVLVHEGHLAGVGARGDGRWDHLGDLLRVGARGDGAGHTISDGADVLSLLNNSDEAVVLDVQVDCSARH

SEQ ID NO: 111168 - protein, 122 aa, Gossypium hirsutum
  Clone ID: uC-gsronu33B018h06b1.pep
AHINTYKKANHKGGLFKETHIQRQKKKEKKDRVRGAMFTGPPFPFIDMPELKLCIVYPNLIAGAIVTQLWLCETPGAAKVNRIQQDARYGGGLLGKGGATGGLFQKLGNWTGERDGPCIDPL

SEQ ID NO: 111169 - protein, 46 aa, Gossypium hirsutum
  Clone ID: uC-gsronu33B018h12b1.pep
RPPLFFFFFFFFFFFFFFFFFFFFFFFFFFYFFFFFFFFFYAKLFD

SEQ ID NO: 111170 - protein, 161 aa, Gossypium hirsutum
  Clone ID: uC-gsronu33B019a04b1.pep
PSRPKWDEAMYYVLGDPTMKPKGYDPMTEAVLLWERDKSATKTRYNLTPFAISLNELTPDLLEKLPPTDSRLRPDQRHLENGEYEMANAEKLRLEQLQRQARKLQERGWQPRWFNKDEDGCYRYIGGYWEAREKRKWDGIPDIFGQCSGSSHNSPSCLIEE

SEQ ID NO: 111171 - protein, 46 aa, Gossypium hirsutum
  Clone ID: uC-gsronu33B019a08b1.pep
FFFVEGFFCTYKFIQCKICVFKVQKILKPKCTDICKIQYFNQINAN

SEQ ID NO: 111172 - protein, 175 aa, Gossypium hirsutum
  Clone ID: uC-gsronu33B019b11b1.pep
MPRLLLAEIVNHIPHIQALLQFWHCCMASPHLPVAGLSSQVPSDLKRLLFLSVLKDLELLTQADDPSESLFWPFGSYVFCCQEGAICVENVASVMKMLHLMMATGSPNQSIEDHLKYGDYVAKVSRQFLQARNFEEGIPDSSYEAGVALALQSSDLTDKEPVVVMGKECLQRLTQ

SEQ ID NO: 111173 - protein, 69 aa, Gossypium hirsutum
  Clone ID: uC-gsronu33B019c02b1.pep
TRATVHSSSYGTKMISKPISSLSITLMAGSRCSSSFSFIRTSSRRTIFSISASFSTSVDLSSPEKPMKE

SEQ ID NO: 111174 - protein, 160 aa, Gossypium hirsutum
  unsure (1)..(160): unsure at all Xaa locations
  Clone ID: uC-gsronu33B019d03b1.pep
MSLLPQTLTLLAFSHIVIILSNAETTSDYSTFIFKNCTTNTFTDSTKFHSETLSTFFEELVSKSSQEKFYKTTTGDDNNGISGFFQCRXDLNNNDCYKCITSLPEMLNILCXKAVSARIQLHGCNVHYEADEFIGKGLNRVAYKVCEEKRRWLWSSRGEG

SEQ ID NO: 111175 - protein, 95 aa, Gossypium hirsutum
  Clone ID: uC-gsronu33B019f02b1.pep
KEKRGNSEKKVLHYTPNAAFYPRSILACRRISLTVREWSHVLDCLMPWRGPPLATLPFRPPFACGSYRSWALFCHSFFRVAFPKGRLGRALGRPV

SEQ ID NO: 111176 - protein, 115 aa, Gossypium hirsutum
  unsure (1)..(115): unsure at all Xaa locations
  Clone ID: uC-gsronu33B019g05b1.pep
PSRPPTRPPTRPGDLDKRRSTTGYLFTLAKAPVSWKSTLQSTVAVSTTEAEYMTVTEAVKEAIXLNGLLKDLGVVQSHISLYCDSQSAIHLAKNQVYHSRTKHIDVRYHFVREVF

SEQ ID NO: 111177 - protein, 90 aa, Gossypium hirsutum
  Clone ID: uC-gsronu33B019h06b1.pep
PIRPKRSVMTVKASSASTDGEEQVPAESKKEDLPVGQLPLESKMQQMAEQKMKMKMAKKIRLRRKRLVRKRKLRKKGRWPPSKMKKLKNV

SEQ ID NO: 111178 - protein, 45 aa, Gossypium hirsutum
  Clone ID: uC-gsronu33B021c02b1.pep
RMLPVVGEDHWKVQNIANVHVYIINTEQQYLANKLGDSTLLDSLN

SEQ ID NO: 111179 - protein, 49 aa, Gossypium hirsutum
  Clone ID: uC-gsronu33B021e09b1.pep
NLLRGRMGFALLMWLANYRGLLVFHVIRTYTDSLCVLLRPDVTSCTQPI

SEQ ID NO: 111180 - protein, 134 aa, Gossypium hirsutum
  Clone ID: uC-gsronu33B021g03b1.pep
MRPPTRPEKVLENCASKLQPYLTQAVENLGISFDDYSSIVASICGATAGAVERDDAAVGKLADDEKIPAEAPLENAAQGDKKIPKEAVSIEQVALVNEKTPVPVACNGIMRTADSISVKKQEDDHIADKSENET

SEQ ID NO: 111181 - protein, 71 aa, Gossypium hirsutum
  Clone ID: uC-gsronu33B021g08b1.pep
QRNLYSIVHLTSELIISKCSSRPCSFVVLFINIIHGDCFACLKKKKKKIKTSQTKKTKIMKKKTKKQTNLK

SEQ ID NO: 111182 - protein, 51 aa, Gossypium hirsutum
  unsure (1)..(51): unsure at all Xaa locations
  Clone ID: uC-gsronu33B021g11b1.pep
THPSLTPQPPDKKGRFNKPNRLLTPXKKKMADQLTQQHNPQTKEAFSLFDK

SEQ ID NO: 111183 - protein, 78 aa, Gossypium hirsutum
  unsure (1)..(78): unsure at all Xaa locations
  Clone ID: uC-gsronu33B021h03b1.pep
RSLKKLTLTMSSTNGGKEARPPKGGTRLWKCIGLRYMTCNDAIDXPTCSXKWPFTGSATIRGNMVAGSCHTAKMVTTI

SEQ ID NO: 111184 - protein, 148 aa, Gossypium hirsutum
  Clone ID: uC-gsronu33B021h11b1.pep
RAMITRLQEERASFQMEALQHLRMMEEQAEYDMEALQNTNDLLAEKEKEIQDLEAELEFYRMKFPNEFMPEGIVKSAYNLQITRDTMDHLEANSIEEKAILHTDTVTGKPNIGSTVEETYQSFEDTNKVTMKNPLSEHEHGYQEELIP

SEQ ID NO: 111185 - protein, 35 aa, Gossypium hirsutum
  Clone ID: uC-gsronu33B027c05b1.pep
ILSKRESSARVDYVPVLRTHRPSLLPIEEAEEAFL

SEQ ID NO: 111186 - protein, 103 aa, Gossypium hirsutum
  unsure (1)..(103): unsure at all Xaa locations
  Clone ID: uC-gsronu33B027c11b1.pep
VVIGGHAGITILPLLSKTKPTVRFTDEEVEQXTVRIQNAGTEVVEAKAGAGSATLSMAYAAARFVESSLRALDGDGDVYECSFVQFDLTNLSFFASRIKLGRN

SEQ ID NO: 111187 - protein, 59 aa, Gossypium hirsutum
  Clone ID: uC-gsronu33B027d05b1.pep
SCKWLTLPTHLSITPSLGRKITGTLFGHRRGHVSFAVQDDPRSEPVMLLELALSTVSMV

SEQ ID NO: 111188 - protein, 113 aa, Gossypium hirsutum
  Clone ID: uC-gsronu33B027e04b1.pep
ALCQNFKEPGVSEFLSAMAAGWNSKLIVESWSYGSPIATSVGLAVAARHTCGRHMCVVPDERSRLGYIKAMEESGTLSSTAVIVGEAEEVMVGAPRVGFLGRGLKAIRISLRF

SEQ ID NO: 111189 - protein, 104 aa, Gossypium hirsutum
  Clone ID: uC-gsronu33B027e05b1.pep
EDDACELSKKKVSLAGRRLATVDATGPRNQISKSAHGRSKHLKRGNIISCFFKNIPVTCCFQHPGTNRPITISVLWTHFAFNFRTLNLCYLERFLPITPVTVAA

SEQ ID NO: 111190 - protein, 84 aa, Gossypium hirsutum
  Clone ID: uC-gsronu33B027e12b1.pep
MLPTTMRNALRVKLKPFAKSLTASIYDASLAAEWSLALVRILEWLAPLAHNTIRWQSEHNLEEQHIISGSNILLVQTLHFADQA

SEQ ID NO: 111191 - protein, 159 aa, Gossypium hirsutum
  Clone ID: uC-gsronu33B027f08b1.pep
FDQFFGLGSETRRTKTHIPDPYGIEIGSPTKIPSGFVETWGLNVHAIDTRGVEDRMGCTECRCNLYNVTKEENGTPLSPNYDGGLLCCYDGTKCRLKDGFIGIERTLYLQYTVKWVDMNSLIVPVNVYNFAVSDTWKRSRNSTGIDSEHTCQVEYHVES

SEQ ID NO: 111192 - protein, 62 aa, Gossypium hirsutum
  Clone ID: uC-gsronu33B027g09b1.pep
LYFRHSKQSFDQQMLQLQVFGSYNSVVFASNAVTQYGYHVICRTPIFQVTFTFLSVSRPYTD

SEQ ID NO: 111193 - protein, 158 aa, Gossypium hirsutum
  Clone ID: uC-gsronu33B028c12b1.pep
DEEQHRLLVYEFMGNGSLSNFLFGVLRPSWQKRLQIASGIAKGLAYLHEECSTQIIHCDIKPQNILLDDCLTAKISDFGLAKLLINSKTQTLTGVRGTKGYVAPEWFRNSPVTVKVDVYSFGVMLLEIICCRKCVEVEMDEEAILTEWAFDCYNEGMM

SEQ ID NO: 111194 - protein, 84 aa, Gossypium hirsutum
  Clone ID: uC-gsronu33B028d03b1.pep
TQKWWCRISSEFLNHCSNISCVRGQTCSECSPLWHCPLRGQALHHLTSDPVAKSELSCSYPEVSTVSILMCIPVSARTVYRKNG

SEQ ID NO: 111195 - protein, 58 aa, Gossypium hirsutum
  Clone ID: uC-gsronu33B028d04b1.pep
PSLPTTRPGSGGPAIDFIHRNHPRACVGDLAVYISLLLDFVMSLSYDVNRLLCGTGPN

SEQ ID NO: 111196 - protein, 35 aa, Gossypium hirsutum
  Clone ID: uC-gsronu33B028e03b1.pep
PSLPPTRSQTLGRAIYFKDRRHPRACLTDLARSFT

SEQ ID NO: 111197 - protein, 29 aa, Gossypium hirsutum
  Clone ID: uC-gsronu33B028e04b1.pep
VRYEGCGAVTVPELESMPKSARTRGRTRG

SEQ ID NO: 111198 - protein, 31 aa, Gossypium hirsutum
  Clone ID: uC-gsronu33B028e09b1.pep
LGPIARLWSVLSLDRDFMKSIIKCMEIARSV

SEQ ID NO: 111199 - protein, 132 aa, Gossypium hirsutum
  unsure (1)..(132): unsure at all Xaa locations
  Clone ID: uC-gsronu33B028e12b1.pep
FAFATTIKNALSVKLKPSAKSVTSLVCYAYLAQDRSLALERISEWMGPPDNNTIRXHSQHNLEKQHIIPETNILSGQTLHSGDQAKTEAGIKDLLDELNNLYSTGGAHNDKALTESDVNGSSQYKIKRDDKR

SEQ ID NO: 111200 - protein, 48 aa, Gossypium hirsutum
  Clone ID: uC-gsronu33B028f02b1.pep
SFHASLVLYTIGNFGLLYRFSPRSSVCMVCSIELGSGFTLRNTFYKYN

SEQ ID NO: 111201 - protein, 53 aa, Gossypium hirsutum
  Clone ID: uC-gsronu33B028f03b1.pep
DSGSCCILAHLVSLAPRSGRYHRRTALFLKSFARLRHLATSLLHARGPLRSLY

SEQ ID NO: 111202 - protein, 39 aa, Gossypium hirsutum
  Clone ID: uC-gsronu33B028f08b1.pep
VHYKGYGTHYIGNEGYKIDTVLVLVSTPPSARTSDRTRE

SEQ ID NO: 111203 - protein, 56 aa, Gossypium hirsutum
  Clone ID: uC-gsronu33B028f09b1.pep
SYSRSEVTEIMRHAPLEVNKKVPVSTHVRLSGQKQVTDFKVVIKTTSVSTSDRTRE

SEQ ID NO: 111204 - protein, 61 aa, Gossypium hirsutum
  Clone ID: uC-gsronu33B028g01b1.pep
FADNWIYWVGPLVGGGLAGLIYGDVFIGSYSAAPASEDYAQKFETLKLLVYGFCVKCFECF

SEQ ID NO: 111205 - protein, 42 aa, Gossypium hirsutum
  Clone ID: uC-gsronu33B028g05b1.pep
INMYKQGFIFITQTLMAGIGASAVSVVSCTPISPLTRARKHG

SEQ ID NO: 111206 - protein, 51 aa, Gossypium hirsutum
  Clone ID: uC-gsronu33B028g07b1.pep
LSRPTTRPRTRGRENYYRDRSHPRACETVLARCINFMIYFVMNLSDDVTDL

SEQ ID NO: 111207 - protein, 58 aa, Gossypium hirsutum
  Clone ID: uC-gsronu33B029a04b1.pep
RVYLLHVSGTVAIAITDAPSIGSMPASGLMACKPAVTPPNPPPATSTCCSALSHADMR

SEQ ID NO: 111208 - protein, 58 aa, Gossypium hirsutum
  Clone ID: uC-gsronu33B029a11b1.pep
ELFGSGGQVEGFGEDLEKGPFRLLRKPKKVTGFWKDWAPLWHCYLLLMPLLMVKDSAI

SEQ ID NO: 111209 - protein, 55 aa, Gossypium hirsutum
  Clone ID: uC-gsronu33B029b12b1.pep
GLSLVVFSEFLVKVLLLNSCPAGQWIRVHLKHILFRESRLEKQTRGLGRNSIPVG

SEQ ID NO: 111210 - protein, 50 aa, Gossypium hirsutum
  Clone ID: uC-gsronu33B029d08b1.pep
SDNWVLCRIFLKKRSAKNDEEGLQSCNQRIGKLRTSKPVFMISRLKTGLT

SEQ ID NO: 111211 - protein, 77 aa, Gossypium hirsutum
  Clone ID: uC-gsronu33B029f02b1.pep
STPSYGQHNSATVNPSYRMNMSAMQRYAPRLDESFYICMGVSYFSLTLLFYLLFFYLFIYSLYPFFSYLFFFFLFLL

SEQ ID NO: 111212 - protein, 197 aa, Gossypium hirsutum
  unsure (1)..(197): unsure at all Xaa locations
  Clone ID: uC-gsronu33B029f04b1.pep
KIRKKDKKKRXKNKMKYKKGIQLKKKDKKEEMNKRKKXKRRKIKERKKRRNRKMKIKRRKEEKKVKRKRKRRDRVENKRXKKEKKKEEKKKVKKIDKKDIKIKKKEKNKRKKEKRXKNIKEGRRRKEKKKREYIKRERDRYYKGIRKKXNKKRGKKKRKRDGKRKKKKXKNKDDKVKRKDKKRKEDKEKKKKKIIKN

SEQ ID NO: 111213 - protein, 146 aa, Gossypium hirsutum
  unsure (1)..(146): unsure at all Xaa locations
  Clone ID: uC-gsronu33B029g12b1.pep
VKAKLIQSRTIPELKILLSEPNMTPSIIEKSLKLLETLSSCKEGRVEIWHDTILLQAIVQKVLKASSKATEHAVTILWIVCYLFRDEKALEAVXSGNGMTKILLLIQSNCSPAVRQMSADLLKXFGVNSKPWLSSYDTKTTHIMPF

SEQ ID NO: 111214 - protein, 64 aa, Gossypium hirsutum
  Clone ID: uC-gsronu33B031a02b1.pep
GQDAANIDNKTDPKTYNLAAAPLINIVHIPRGRQMATRMLATQAGVTIFHKLFFRGEVKKGRRI

SEQ ID NO: 111215 - protein, 52 aa, Gossypium hirsutum
  Clone ID: uC-gsronu33B031b11b1.pep
AHTLFPQTLFLTSNARYCQKVSIITLLLNLLTFTWVERKGEQRDAFSAQRFL

SEQ ID NO: 111216 - protein, 75 aa, Gossypium hirsutum
  Clone ID: uC-gsronu33B031c06b1.pep
HYQFLVNEIPSEKSLQFIHYQQQGWTFRVIDNTNPNQEYHVGSIVHKFVGSRAASTNSVTPLCPDCGADAWANEW

SEQ ID NO: 111217 - protein, 73 aa, Gossypium hirsutum
  unsure (1)..(73): unsure at all Xaa locations
  Clone ID: uC-gsronu33B031c07b1.pep
LIRAEQFWVIGGDSSHLXVVFKGILRVREGIDTKFTVTAKVGDDAILXESYIVKWTTLLMPPTSLLIDNMVGV

SEQ ID NO: 111218 - protein, 68 aa, Gossypium hirsutum
  Clone ID: uC-gsronu33B031c09b1.pep
NQRSISTSEHNIMVDACTSNTSSYLKLKSLYLVLKQPLVASLGVLVCLFVFAVCTALTYRFCICYNDF

SEQ ID NO: 111219 - protein, 45 aa, Gossypium hirsutum
  Clone ID: uC-gsronu33B031d03b1.pep
KKLAKELKKSTMIEKAILSLQMHLLCSNLNIKWTSAITHHYCDKD

SEQ ID NO: 111220 - protein, 55 aa, Gossypium hirsutum
  unsure (1)..(55): unsure at all Xaa locations
  Clone ID: uC-gsronu33B031e05b1.pep
CNFSKQNMVEILSYLIEETLAYMSRNMSSXGSCWSASLKSTPAKTTTDVVPSPTS

SEQ ID NO: 111221 - protein, 34 aa, Gossypium hirsutum
  Clone ID: uC-gsronu33B031e08b1.pep
ENISLVVEKTCRKNPKVIIAKMQQPLMATLILLL

SEQ ID NO: 111222 - protein, 130 aa, Gossypium hirsutum
  unsure (1)..(130): unsure at all Xaa locations
  Clone ID: uC-gsronu33B031g08b1.pep
HSFAHASEEGLCPLTPEETALVLRALGIDRNVQIYIAAGEIYGGERRMAPLAEAFPNLVSKMYVRHLQCMLYVIXQSAFLAQQVRRETLLVRSDLKFXQNHSSQMAVSDYLVFLESDLFVPSYDGNMAKV

SEQ ID NO: 111223 - protein, 162 aa, Gossypium hirsutum
  Clone ID: uC-gsronu33B031g09b1.pep
HSFADEWWCEPGHGDWCTCLEKYTLCRDGIYHKQDQFERLLPTFVQVIDLTAQEESEYWTVMSAVFEGKPVESIELRPNLDYVASNSIEASINRKVRLLRTMLQWEEKLRSESSFGRQDGGAKSRNHADSGCSCGSSYYMLALWCIMRLRTGRTVANAARRA

SEQ ID NO: 111224 - protein, 46 aa, Gossypium hirsutum
  Clone ID: uC-gsronu33B031h01b1.pep
ANSVRVSALALVVDIGPIGPVFGSWVLKIGLGYVIGFGLCNWTLNI

SEQ ID NO: 111225 - protein, 34 aa, Gossypium hirsutum
  Clone ID: uC-gsronu33B031h02b1.pep
HSIGDDYSSSITPEALNYGGCRDRGRDGRCAQDE

SEQ ID NO: 111226 - protein, 71 aa, Gossypium hirsutum
  Clone ID: uC-gsronu33B032a06b1.pep
GKKDYVKPQALVELVSIHVAKVMIEEEHRADVEKHSLLYKLHLSNSNSSSSSDMEEGDRRSDYEEDEIGEG

SEQ ID NO: 111227 - protein, 37 aa, Gossypium hirsutum
  Clone ID: uC-gsronu33B032b02b1.pep
TKKLFFLTKTENNCIISNSSTSPPKLGTIKNVCLAQN

SEQ ID NO: 111228 - protein, 72 aa, Gossypium hirsutum
  Clone ID: uC-gsronu33B032b06b1.pep
VCPKAWVIQPFITSLHLCPHIIAQWNQTLDEVLLNNYYSLNQKSLHYVIFYFNNFTHIIRCKNMMVANNTSI

SEQ ID NO: 111229 - protein, 214 aa, Gossypium hirsutum
  unsure (1)..(214): unsure at all Xaa locations
  Clone ID: uC-gsronu33B032b07b1.pep
KKTLKNKKIFKSKKKIGKKNIFKKINKEKKNKEKKIIITXYRKKDDNXKLRKRKKIKIKXKYKKRTKKNNIKKNKSKKKKKKTKRIVKKKNNXKNKLDGIRRKKKKXKRQKIKKVKXKENKKIRKKPTKKYNLKKKNXKGKNRKQNSNYKKRIKKEKKXKKINIKKKKRNNMKKDKKRXKIKILIKKNIIKKQKKKKDEKKKIMKKKTATKTVN

SEQ ID NO: 111230 - protein, 164 aa, Gossypium hirsutum
  Clone ID: uC-gsronu33B032c02b1.pep
HIASVFLEELRPFLPVKKEVLEILLEPFVGIMGRVSDKILVGKIRINVFDEFVKMGRRLLELKTSIEEVDQGDDVVVLGTISLVMGFSKKFYELGSSVDCCQGNRKILLGVHEEFLKLEKDLTSLGIDISIPECNEGGEEDEVSELVPIASEMGLNIFDGASEL

SEQ ID NO: 111231 - protein, 91 aa, Gossypium hirsutum
  Clone ID: uC-gsronu33B032d10b1.pep
TRVNVWVEANQKKRLFQKKLCWVNNFLLVVSNDRCNAGYNNSFHYSKEVGKIVKSNVRVTKKTSTFFSGWSWIPAFSLQVCHQLHRFRRRE

SEQ ID NO: 111232 - protein, 70 aa, Gossypium hirsutum
  Clone ID: uC-gsronu33B032e03b1.pep
MLELRLVQGSLLKKVLEAIKDLVNDANSDGSATGFILLAMFTSHVALVTVLSVKACFFFLLPTKYVPLFY

SEQ ID NO: 111233 - protein, 108 aa, Gossypium hirsutum
  unsure (1)..(108): unsure at all Xaa locations
  Clone ID: uC-gsronu33B032e06b1.pep
KRKKKNKLKKKKKEXEKKKNKNNSKYIRNKKRKXKNKEKEKKLKKNKKKEEINKKKKKXNKKNNKIKIKKKKRKIKKKXKKKKKNKKKKYKKXKLNKRKKKKKKRKKK

SEQ ID NO: 111234 - protein, 74 aa, Gossypium hirsutum
  Clone ID: uC-gsronu33B032g04b1.pep
CMVHTEGYGVVYEGLGPTNISMAPSGAGCYGVYGIVHTVSVHAPQTRYKIRYFAFVLLHLMGAKPFDMVTFLNI

SEQ ID NO: 111235 - protein, 78 aa, Gossypium hirsutum
  Clone ID: uC-gsronu33B032g08b1.pep
MAAKDIMAGVFEPFAIVYLSDPLGLIADFCSGMLPCRSHIGKAECIPNQYACNPEPSPSFGRNPHSRQIFIVKSGSES

SEQ ID NO: 111236 - protein, 85 aa, Gossypium hirsutum
  Clone ID: uC-gsronu33B032h05b1.pep
MYQAIMGCFISKHADELANNAAYVATPGKGILAADESTGTIGKRVSSINVKKAEDNRPAPQKLLFTAAEALEDLIAVTLFEETLY

SEQ ID NO: 111237 - protein, 188 aa, Gossypium hirsutum
  Clone ID: uC-gsronu33B036b01b1.pep
LSLSLDSIPDAHVAVQLLFISVDPYLRTRMSGQEDGLYFPQFSLNQVITAFGVGRVMRSKDEKYSEGDIVLNAFFPVAEYCVVPSSVLIRKIDPEAGIPLPEYLSCLGVPGFAAWVGIEVLGEAKPGSNAFISAAAGGVGMVAGQLAKLKGCRVIGSTGSDAKVRLIKEEFGYDDVFNYNKELILMRL

SEQ ID NO: 111238 - protein, 140 aa, Gossypium hirsutum
  Clone ID: uC-gsronu33B036b07b1.pep
MRPVNMQHNVMIEAVENHMPETIIIDEIGTELEALAASTIAQRGVQLVGTAHGMTIDNIIKNPSLQILVGGIESVTLGDEEARKRKVQKTILERKGPSTFTCAVEMISRTECRVHHRLDATVDAILAGKSSLFEIRQMEP

SEQ ID NO: 111239 - protein, 59 aa, Gossypium hirsutum
  Clone ID: uC-gsronu33B036c04b1.pep
KEFISLAAEFKSLAKAIKVLRSKPVFLHKVRISTSGTEVFRSTFHKQTDEIKNKPTTII

SEQ ID NO: 111240 - protein, 171 aa, Gossypium hirsutum
  Clone ID: uC-gsronu33B036c10b1.pep
STRPGLYRAVDVYLKAHPWIPESEREKICGVLDCQKLTLEACTHAAQNERLPLRAVVQVLFFEQLQLRHAIAGTLLAAETAPMNAGRLSGTRRDDDEEEEEQQDEEEERVAMSRGEQGSTTWRAAVRENQVLRLDMDSMRTRVHQLERECFTLKKVIQKIEKGNPRGSGWR

SEQ ID NO: 111241 - protein, 81 aa, Gossypium hirsutum
  Clone ID: uC-gsronu33B036e03b1.pep
PTTQNQKNNKQTLGAPHLGTFDQPTPAAPPLSHPPPCTFRGFWATVYGGRHGGATAGEWPDPLAGPRPSSEKLTLSLSLFF

SEQ ID NO: 111242 - protein, 83 aa, Gossypium hirsutum
  unsure (1)..(83): unsure at all Xaa locations
  Clone ID: uC-gsronu33B036f02b1.pep
MSSNFLTNSRCSSSSWTPKQNKTFEKALAKYYPDTSGPLHXVAKVGGGKSVEEVKLNYDALVRDLKDIESGRYPYPYPSGSNS

SEQ ID NO: 111243 - protein, 59 aa, Gossypium hirsutum
  Clone ID: uC-gsronu33B036f05b1.pep
REAAIDAEHTCQLALIKVVELHLFLDSSRKLHNEDGFAGLLSFLPKPASNFVLHGRTRG

SEQ ID NO: 111244 - protein, 81 aa, Gossypium hirsutum
  Clone ID: uC-gsronu33B036g12b1.pep
IIGKNLSYNKLLSLAQKPLNAQKPDIPVSTPLKGIALTNHPFFGFFPSTLGKVFSKLSQRVSLARPQKTLRASFNILRTQK

SEQ ID NO: 111245 - protein, 62 aa, Gossypium hirsutum
  Clone ID: uC-gsronu33B036h01b1.pep
PIRSLKTAAQPLCMNMPAATLTMCPSCERIGGVAGDGNSKNPFSMPTKPRFYKPVTNPSAAC

SEQ ID NO: 111246 - protein, 105 aa, Gossypium hirsutum
  unsure (1)..(105): unsure at all Xaa locations
  Clone ID: uC-gsronu33B036h06b1.pep
RNFGGWSLLCNRELSAVNNMDTNNCMSTPTRGESTMITGDXGTQMVTRSRPRILNNGRATLKRNGTFSGQEGXNELMKIFPTFEEKNFTAPNSQIDYLKRISLKM

SEQ ID NO: 111247 - protein, 160 aa, Gossypium hirsutum
  unsure (1)..(160): unsure at all Xaa locations
  Clone ID: uC-gsronu33B037b06b1.pep
HKQVKGSENPRSYYKCTYPNCPTKKKVERSLDGQITEIVYKGSHNHPKPQSTRRSSSSSSSSIAIQASSAATSEIPDHSFISHGSGHMDSAATPENSSISVGDDDFDRGSQKSKXGGDEFDEDEPDAKRXRGEGETEGISALGVNREGTRVVXNTSDIDI

SEQ ID NO: 111248 - protein, 73 aa, Gossypium hirsutum
  Clone ID: uC-gsronu33B037b08b1.pep
MNLKEPLWSKRTESNEPPSPSSSLPRDPETEAAAAAATSAVEELVNSLNKQRIYREVTLALCTGLRDVRAEFS

SEQ ID NO: 111249 - protein, 62 aa, Gossypium hirsutum
  Clone ID: uC-gsronu33B037c02b1.pep
EIVVFACTISKFLASYNYQRTIRRLVRASLSNFLIANCSRFSLVSELLHSMQHQFNIWVLDR

SEQ ID NO: 111250 - protein, 74 aa, Gossypium hirsutum
  Clone ID: uC-gsronu33B037c07b1.pep
CFRGFHSYNYLPPLYRVLRIGHQCIIQWPILQYSPCEASNSFLRSYLDMSQCPIPRISYHLRLRVQIIQYVGES

SEQ ID NO: 111251 - protein, 64 aa, Gossypium hirsutum
  Clone ID: uC-gsronu33B037c12b1.pep
KTTSSMSSYHCFSAINCPSIAAYLKTFHLQSYTEFMTKIELFSIPITAGIRNKIKMCLNLHALE

SEQ ID NO: 111252 - protein, 70 aa, Gossypium hirsutum
  Clone ID: uC-gsronu33B037f02b1.pep
IACGALFYFFFCVYLFSMICILLFGHSRILSPSRSQTFIRSRRPSRSSTPIRSCSQVDSPRAGRRRAPLQ

SEQ ID NO: 111253 - protein, 63 aa, Gossypium hirsutum
  Clone ID: uC-gsronu33B037g12b1.pep
FFFLFKFGLYSLFPITLFFLFFFVKSFSCPYCCSLFYEELKYNVKRIPCVSLIVKMFTIPVVV

SEQ ID NO: 111254 - protein, 68 aa, Gossypium hirsutum
  unsure (1)..(68): unsure at all Xaa locations
  Clone ID: uC-gsronu33B037h09b1.pep
RLACEFFIMGKNNTIMAGDTWVAHSILVHKSNEDKIMILDFYKLYXASGESGDRLQFTEYIQKNVALY

SEQ ID NO: 111255 - protein, 59 aa, Gossypium hirsutum
  Clone ID: uC-gsronu33B038a08b1.pep
LFQQKAGDQQAPLWHSILDKRNAPVYQALPQLDFLRQHPPCILFFWNAHLEYLRRYRSL

SEQ ID NO: 111256 - protein, 78 aa, Gossypium hirsutum
  Clone ID: uC-gsronu33B038a10b1.pep
RGIFVSVNNKNKWWISFKYEKLPTFCFGCGKLRHRLSGCNSLNPFLRRYLRKSSVSHLQKSLTMTSWSGGESLQENSQ

SEQ ID NO: 111257 - protein, 98 aa, Gossypium hirsutum
  Clone ID: uC-gsronu33B038b06b1.pep
SSVLFSLNDNSIKLGSSTMQKNCSFKIHPLLSPALDFSGENIVASKEALGRMKTKESMRNTNLQKSMEKIKFGVDQCLDSSIFILGNKLNIIIGRTKG

SEQ ID NO: 111258 - protein, 66 aa, Gossypium hirsutum
  Clone ID: uC-gsronu33B038c01b1.pep
PSTALATHGFHLHPRTTRASTSESMPTTRLTFGGHVHMPFRSGPPAGPDHLSSPCGRHEYLSNNGR

SEQ ID NO: 111259 - protein, 163 aa, Gossypium hirsutum
  Clone ID: uC-gsronu33B038c03b1.pep
EVYGEKAILVTEVKELENRLLSLSDERDKSLAILDEMRQTLEARQSAAQELMKAAEQEKLEKEESARNALAEQEAIMVKVVEESKILRQEAEENSKLREFLMDRGQIIDSLQGEISVICEDIRLLKQKFDDRIPLSKSISSSQTSCILASSGSSLKADQQILV

SEQ ID NO: 111260 - protein, 76 aa, Gossypium hirsutum
  Clone ID: uC-gsronu33B038e10b1.pep
VCKFLNQCGFKSNFFNVLHILWRLDTSNFNMSASCFDYPTFFLKKMKKERFIFSREKNVNFFLKIISLLKTSICPS

SEQ ID NO: 111261 - protein, 63 aa, Gossypium hirsutum
  Clone ID: uC-gsronu33B038f07b1.pep
PPNLFHIGHLLGYMVPLRPIHCPRRPKSLPEICKGLGKNTRLELEHSTAKLKPKPDLARFSSL

SEQ ID NO: 111262 - protein, 55 aa, Gossypium hirsutum
  Clone ID: uC-gsronu33B038g05b1.pep
GIVIGPCNGDILMAHSINLYLVYFYLFWFFWVLGPGKFGPLQYDLQNKLYKITFL

SEQ ID NO: 111263 - protein, 131 aa, Gossypium hirsutum
  Clone ID: uC-gsronu33B038g07b1.pep
PFVRDVVHVRARRGEATDSHSLAERVRRGKINERLRCLQDIVPGCYKTMGMAVMLDEIINYVQSLQNQVEFLSMKLTAASTYYDFNSDTDAVERMQREKAQGAKDEMDKFMREGDTERLACFHSSTWSSLT

SEQ ID NO: 111264 - protein, 41 aa, Gossypium hirsutum
  Clone ID: uC-gsronu33B038h01b1.pep
SHPCRSAHPARFSPDDKFSKERVTCKKRFGILPTQQPAVRY

SEQ ID NO: 111265 - protein, 44 aa, Gossypium hirsutum
  Clone ID: uC-gsronu33B038h08b1.pep
CSRKENFNTQQIQKKIKDRESYPDYLTILILYQDEVGNDVLQVT

SEQ ID NO: 111266 - protein, 177 aa, Gossypium hirsutum
  Clone ID: uC-gsronu33B038h10b1.pep
EFSCWLQESVCHRVQEEVSSVNDSGYLEHLFFLLTGRQLDAAVELAASKGDVRLACLLSQAGGPTVNRSDVSRQLDIWRINGLDFNFIEKDRIRLYELLAGNIHGALHGIKIDWKRFLGLLMWYHLPSDTALPVVFRTYQHLLDDGKAPFPVPIYIDEGPVEENANLSRVERFDLSY

SEQ ID NO: 111267 - protein, 37 aa, Gossypium hirsutum
  Clone ID: uC-gsronu33B039a01b1.pep
MADKAVTIRTRKCMTNRLLSRKQFIIDVLHTGRPFVS

SEQ ID NO: 111268 - protein, 39 aa, Gossypium hirsutum
  Clone ID: uC-gsronu33B039a04b1.pep
SKSINYNVVCCIETILELSNIKLDYCEVKSYKLLKEPIS

SEQ ID NO: 111269 - protein, 35 aa, Gossypium hirsutum
  Clone ID: uC-gsronu33B039c06b1.pep
PLPPFADPPVELILKIPNQRFLFRIGNVKVGRTRG

SEQ ID NO: 111270 - protein, 100 aa, Gossypium hirsutum
  Clone ID: uC-gsronu33B040a07b1.pep
IFKNLKKKKKKRKKFKVGQKRAHEASILVPASFWAPPLVSPTLTAPAVVVQPPDWATPGVTHLNRLATHAGCASWASPEVAPTVGPPHCCAGPIALRAPP

SEQ ID NO: 111271 - protein, 149 aa, Gossypium hirsutum
  unsure (1)..(149): unsure at all Xaa locations
  Clone ID: uC-gsronu33B040b01b1.pep
MTTYGTIPASTLPSANLEYLSRAKERIKDGLGARHPWKLMFNIHSLNCPRTFSEAISRFRANLAYFRMNYAIIVLLILFLSLLWHPISLVVLIIMMALWXFLYFLRDEPLAIFNRTIDDRVVLVVLGVSTFVXLLLTDATSNILVSVMI

SEQ ID NO: 111272 - protein, 35 aa, Gossypium hirsutum
  Clone ID: uC-gsronu33B040c07b1.pep
PSRPSDKNYTKADALQKKITISGYRVLNVLNPYIL

SEQ ID NO: 111273 - protein, 40 aa, Gossypium hirsutum
  Clone ID: uC-gsronu33B040c12b1.pep
VTQMTPTQASDEEANLFAMQLASASVFAMVLKSDIELDLL

SEQ ID NO: 111274 - protein, 36 aa, Gossypium hirsutum
  Clone ID: uC-gsronu33B040d03b1.pep
MFNGSLEAREAEKNGSVSSGKGLAPRAEHGVIFRFE

SEQ ID NO: 111275 - protein, 74 aa, Gossypium hirsutum
  unsure (1)..(74): unsure at all Xaa locations
  Clone ID: uC-gsronu33B040d12b1.pep
MTLAARVLSLGGRERGTKTGLVMDAGAITTQAHVDYEKIXGGTSRPTGLEPDDDGLDADNXQDLVNIEQQSPDI

SEQ ID NO: 111276 - protein, 95 aa, Gossypium hirsutum
  Clone ID: uC-gsronu33B040e08b1.pep
MKGSRERSRDEPLTDDQTVELMEAFRVADRVGDGGVTTWVPATVLRSVVQTLTEAALQDMLHDVDADGNGTSDGTVDLNVMARLMTGTVSDADPK

SEQ ID NO: 111277 - protein, 141 aa, Gossypium hirsutum
  unsure (1)..(141): unsure at all Xaa locations
  Clone ID: uC-gsronu33B040e10b1.pep
KKINKGKRKKKEEREYKEEKKNNIMKKYKRLKKEKKQENKKKRKKKKKIXKIKVNKKKKKKKRRINKKERRKIKKKKREEKEVIKKENMKNMKVKKRKNKKKEMKKERKKKXKKREGIEKKRDRRRKDKTKQRVEGKKKIE

SEQ ID NO: 111278 - protein, 68 aa, Gossypium hirsutum
  unsure (1)..(68): unsure at all Xaa locations
  Clone ID: uC-gsronu33B040f07b1.pep
DRFDPRCRADYNIQKEXTLHLVLRLRGGMQIFVKTLTGKTITFEVESXDTIDNVKAMIHDKEGIPPDE

SEQ ID NO: 111279 - protein, 44 aa, Gossypium hirsutum
  unsure (1)..(44): unsure at all Xaa locations
  Clone ID: uC-gsronu33B040g02b1.pep
ALTLSMVSEGSSSVFVFKKKQGFVVSLXLQNLKIVLKGYSGPVL

SEQ ID NO: 111280 - protein, 96 aa, Gossypium hirsutum
  Clone ID: uC-gsronu33B040g04b1.pep
MDKDSLWMSRKVILWFMLVYFNSCDICVYSYLFSFFFNFFYSFLLFNVILFIFFLVMVFSLYFIFLLFFYFFFFYFFCILFFFLFVFIFIFIVIFI

SEQ ID NO: 111281 - protein, 59 aa, Gossypium hirsutum
  Clone ID: uC-gsronu33B040g08b1.pep
CPLSYWDTGGNTKGEETEGQAGTPDDKSSARGQKTPNHTKGLKNDQHATLLRKGHPQET

SEQ ID NO: 111282 - protein, 48 aa, Gossypium hirsutum
  Clone ID: uC-gsronu33B041a06b1.pep
EMNMMLQIQFQDEGSLKVVAAGTSVDSPVSTTEEHTSLLRSGLPNLSM

SEQ ID NO: 111283 - protein, 65 aa, Gossypium hirsutum
  Clone ID: uC-gsronu33B041b02b1.pep
EYQQCLNSLLQFAVLELKMSYLLCFRPLEKTISDFQMHIMMLGFHHGYIYYIYNSSYTSTGKLVL

SEQ ID NO: 111284 - protein, 81 aa, Gossypium hirsutum
  Clone ID: uC-gsronu33B041e10b1.pep
SVSWAVLRASSTSGNYHCCLLGEIRNCLISESCLYVTCMNIPMHLFIRYLLMQKPSLKHSFRGYLYTCMTLLFRSFCFLYY

SEQ ID NO: 111285 - protein, 116 aa, Gossypium hirsutum
  Clone ID: uC-gsronu33B041f05b1.pep
KPLITREHPREKKMAIRRWCRFNSINESTGHCGSNIALENKGMSSIAPFTVDSVACLKSVSTCATLIGDNARLFGLFGVFWRSISSMHTNYELCFTFTNCQYVTTMYMNIDFDELL

SEQ ID NO: 111286 - protein, 77 aa, Gossypium hirsutum
  Clone ID: uC-gsronu33B041f12b1.pep
PSRPVNSEQERLSIPLFFFPSHYVKVAPLDELVNEQNPAKYKEYSWGKYYINRTGSNYKKLEAENLQIDHFKTPESE

SEQ ID NO: 111287 - protein, 73 aa, Gossypium hirsutum
  Clone ID: uC-gsronu33B041g12b1.pep
PCVRGRVGSVPAVLNFLSNLLNFTFYSNPSMASLSDHSNSEVVYRWQNTGPPFKFLVPFSLCPCSFLYIRLSL

SEQ ID NO: 111288 - protein, 70 aa, Gossypium hirsutum
  Clone ID: uC-gsronu33B041h11b1.pep
SSSINKTAGEDHLKASSVLAENRFRAATMVGVEGGQHWASAAFPANDSKTRSGSKLQSLGKHKLPASDTA

SEQ ID NO: 111289 - protein, 46 aa, Gossypium hirsutum
  Clone ID: uC-gsronu33B042b07b1.pep
VKCRKGSNEELTNLQKITNKVHGLTGTSCMQKNRKYTNFSIPVDKE

SEQ ID NO: 111290 - protein, 114 aa, Gossypium hirsutum
  unsure (1)..(114): unsure at all Xaa locations
  Clone ID: uC-gsronu33B042c01b1.pep
MFSKVFDSLINFFSEEIICNGTGTSASDSQHSRLRKSHGILNMLSWGILMIIGAMAGRYFKQWDPXWFYSHAAIQSCAFLLGLAGIISGFVLEDRLVPEVDTHKALGILILVLG

SEQ ID NO: 111291 - protein, 168 aa, Gossypium hirsutum
  Clone ID: uC-gsronu33B042d02b1.pep
HASAHASALVFENISMDFITGPPPSKGKILVMVVVDRLSKYGHFVGLPTHFSSQIVASAFVQEVVRLHGIPTEIVSDRDPRFLSSFWKEVYRLQGTTLSMSTAYHLQTDGQTEALNRCLEMYLSCYASDHPTSWMLFLPWAEYWYNTSYQTAAQMTPFEVLYGRPHLQ

SEQ ID NO: 111292 - protein, 26 aa, Gossypium hirsutum
  Clone ID: uC-gsronu33B042e06b1.pep
QLFFHFFFLISKQFMLILLYLTSLKF

SEQ ID NO: 111293 - protein, 138 aa, Gossypium hirsutum
  Clone ID: uC-gsronu33B042f02b1.pep
LGRLPVPVRSSRVVPRVRFLFSYRRCISKKKKKPKHKEKGSPPLAGPGFPSPFFAPPSPFLLRPLFFFHCPRVSPAGPLIVPGLPPPFSSLPRPSPFPPPRRLTAPGLPPVPPWVFVFCPLELGYWFPPPFGFSFHPP

SEQ ID NO: 111294 - protein, 66 aa, Gossypium hirsutum
  Clone ID: uC-gsronu33B044a02b1.pep
PIRPEKQRQLVWPLRYKIIKGIARGLLYLHSDSRLKIIHRDLKAGNILLDKDMTPKISDFGMVKIV

SEQ ID NO: 111295 - protein, 64 aa, Gossypium hirsutum
  Clone ID: uC-gsronu33B044b09b1.pep
NINYSHMLKNIYSSRVEQLWGLMKATCFLLLASCFLKLLKAMLLGLGCVCDAGKCLTWLWSDLS

SEQ ID NO: 111296 - protein, 40 aa, Gossypium hirsutum
  Clone ID: uC-gsronu33B044c02b1.pep
HYMYIVYIYIKVCFPSSTLFNSNKKTVFPFSTTKIFYKHV

SEQ ID NO: 111297 - protein, 80 aa, Gossypium hirsutum
  unsure (1)..(80): unsure at all Xaa locations
  Clone ID: uC-gsronu33B044c08b1.pep
LSSFYFYFFSYXFLFFKXMIYIFFTLTYIFFFYFISFNFYFIYSFIFLLFILFIFSFLSIFYLSFLFLNFLFFFLFFHFF

SEQ ID NO: 111298 - protein, 94 aa, Gossypium hirsutum
  Clone ID: uC-gsronu33B044d03b1.pep
NLTIVLYALKIWRHYLYGERCIIYTDHKSLKYLLTQKELNLMQRRCVELLKDYDCTIEYHPSKVNVVADVLSRKSITKLRVMFARLSLFEEDRQ

SEQ ID NO: 111299 - protein, 53 aa, Gossypium hirsutum
  Clone ID: uC-gsronu33B044e08b1.pep
MCIFTKKTLFLHLLSPLFFFYFFFFFFFFFFFFFFFFFFFFFFFFFFFFFFFI

SEQ ID NO: 111300 - protein, 135 aa, Gossypium hirsutum
  unsure (1)..(135): unsure at all Xaa locations
  Clone ID: uC-gsronu33B044f03b1.pep
NTSVXSTPNTHKRQEPSYPDCLLQLLRSIQLQDFDLIRALTSNRRRPAWRSKHGWGLRWWGRAGRRDGGVERRRRDGESRSSGEVVLRGAVGRGCGSDGVGRVSFDDLEALGRWDGADLVSLEFETAVEDTRRAG

SEQ ID NO: 111301 - protein, 77 aa, Gossypium hirsutum
  unsure (1)..(77): unsure at all Xaa locations
  Clone ID: uC-gsronu33B044f04b1.pep
ILHNLCGGPNIVKLLDVVXHQHSQTPSXIFEYDNSSDLMDLYRTVTDYDIRYYIYELLKGLDYCHLHGITHRDDTPD

SEQ ID NO: 111302 - protein, 90 aa, Gossypium hirsutum
  unsure (1)..(90): unsure at all Xaa locations
  Clone ID: uC-gsronu33B044h03b1.pep
GVSALGKDGNNGPNIREVGKSILNLLYSEPGNGLWQAKADSNFMHXGHRNPLLEETLVVIPDSIWDAPIAGGXHGGREDLFANVHDLLPP

SEQ ID NO: 111303 - protein, 42 aa, Gossypium hirsutum
  Clone ID: uC-gsronu33B046d01b1.pep
TIKFVKILNMNTIILVMFISLFSCLSITSRCHFVLKIVRGLW

SEQ ID NO: 111304 - protein, 67 aa, Gossypium hirsutum
  Clone ID: uC-gsronu33B046d11b1.pep
VLDVPFEMIEYFDPCHPILVGGIGLGEENIGYMQTRLNRHKWYMKVLKTRDPIIVKIGWRLYQTIPV

SEQ ID NO: 111305 - protein, 35 aa, Gossypium hirsutum
  unsure (1)..(35): unsure at all Xaa locations
  Clone ID: uC-gsronu33B046f01b1.pep
VVLRFRYVSXMRSHACVSKPEASTPTSVDPFSNAT

SEQ ID NO: 111306 - protein, 72 aa, Gossypium hirsutum
  unsure (1)..(72): unsure at all Xaa locations
  Clone ID: uC-gsronu33B046h09b1.pep
MLTMASNPKAFFDMXIGGHPAGRIVMELFADVTSCTAENLRLLCTGEKGDGRSGKLLHYNGFEFHRVIPDFM

SEQ ID NO: 111307 - protein, 58 aa, Gossypium hirsutum
  Clone ID: uC-gsronu33B046h11b1.pep
LQELTALIKTDITTLNMALSDLQTLQNMEIADGNYSEDRIVHSTTVCDDLKNKLMGAT

SEQ ID NO: 111308 - protein, 87 aa, Gossypium hirsutum
  unsure (1)..(87): unsure at all Xaa locations
  Clone ID: uC-gsronu33B047b03b1.pep
VEIIQEMSKEHLPEPLDFFIWTVEDAVCVGEDINLGSYRQIFKEHGVNGEYLEGMSMFTTEQILRFIRQCHMKXGDFITLCKELRRI

SEQ ID NO: 111309 - protein, 64 aa, Gossypium hirsutum
  Clone ID: uC-gsronu33B047b05b1.pep
TAREYDISEERIGRLTKTLEACASSSQVLLEDSTNRYRFGEPFSLGLLDVSSATCKPSKLAKER

SEQ ID NO: 111310 - protein, 96 aa, Gossypium hirsutum
  Clone ID: uC-gsronu33B047c03b1.pep
PYIRPRLRVLYAHADWLSPAIFYYIVYGVVKSVAKDVQISYMITTIISENTQPCASSEMSWNLFELTASTTLTYWIELSRIYEIMLNMYIFVFTAE

SEQ ID NO: 111311 - protein, 46 aa, Gossypium hirsutum
  Clone ID: uC-gsronu33B047c06b1.pep
VPNRQHHLNVLEKSFCSLHMIVSLPRVYQRENHSVYWFYRSYLYSV

SEQ ID NO: 111312 - protein, 71 aa, Gossypium hirsutum
  Clone ID: uC-gsronu33B047d12b1.pep
PCSTSAFMGNISRIISCIRLCGNNHGIISTRVVLSEVSHIQILVCNGYLTVFILHVVRTFIHSDILTGPSH

SEQ ID NO: 111313 - protein, 35 aa, Gossypium hirsutum
  Clone ID: uC-gsronu33B047e11b1.pep
VHTLAEIRISTAMSEAVLKPNQSSFLYVRVVGREG

SEQ ID NO: 111314 - protein, 71 aa, Gossypium hirsutum
  unsure (1)..(71): unsure at all Xaa locations
  Clone ID: uC-gsronu33B047f12b1.pep
EGGTREDDTEDEGSEHIHDKDCXIAIEDKDSDVTNFVEDHPGGDDAMIASTDKDATDDSEDVGQKSSVRAM

SEQ ID NO: 111315 - protein, 53 aa, Gossypium hirsutum
  Clone ID: uC-gsronu33B047g01b1.pep
LLSFHEKGDDAMHCVQLKLGMLLEARHIIVVSTSPSDVLPNDASNQIETAGKT

SEQ ID NO: 111316 - protein, 42 aa, Gossypium hirsutum
  Clone ID: uC-gsronu33B047g02b1.pep
SIFELAKNNMKHSLLYINFQESKISQTACLHILHSLSKANAW

SEQ ID NO: 111317 - protein, 57 aa, Gossypium hirsutum
  Clone ID: uC-gsronu33B047h09b1.pep
PFVRKKMLPIPLLGFRPCFREPHRRVIGASAPSPLTQIHEANTGKPFLFQFLFRIRL

SEQ ID NO: 111318 - protein, 44 aa, Gossypium hirsutum
  Clone ID: uC-gsronu33B048c04b1.pep
KYNENKCQPLFPIIFLLCLKVLNKELEAIEYRTKSKHVEVQEKG

SEQ ID NO: 111319 - protein, 45 aa, Gossypium hirsutum
  Clone ID: uC-gsronu33B048d01b1.pep
DSQIEKLSNTRTLEWNRAFKISNSQQSWRVLSMFQKLRTRGQTRG

SEQ ID NO: 111320 - protein, 40 aa, Gossypium hirsutum
  Clone ID: uC-gsronu33B048d06b1.pep
CGTCGINIMNYHIGTYLKMVVLVLCKKKRTRGRTRGRREG

SEQ ID NO: 111321 - protein, 69 aa, Gossypium hirsutum
  Clone ID: uC-gsronu33B048e01b1.pep
PYKTLDMNIGHRITLNHHTIINHTFKVVAMISSIHMMIMSSSCTNYLLSFQDQNQLTLFCFLTCRSKIR

SEQ ID NO: 111322 - protein, 49 aa, Gossypium hirsutum
  Clone ID: uC-gsronu33B048e06b1.pep
ARSLSSHSLILYLVFLFSLPCLLLALIWFYLLACPLYIPTLTGAPCLLM

SEQ ID NO: 111323 - protein, 66 aa, Gossypium hirsutum
  Clone ID: uC-gsronu33B048f01b1.pep
SHHLTLSSYPHFLLLPFLPSFWLFFWFNLIIVSPPNDSIPLLQPLPACPHYHCLDLFWLVHPLLSF

SEQ ID NO: 111324 - protein, 133 aa, Gossypium hirsutum
  unsure (1)..(133): unsure at all Xaa locations
  Clone ID: uC-gsronu33B049c04b1.pep
PVLHLQHQSEHEDHLTGGGSGGGSADDLMNTGHNDLVARRPRGRPPGSKNKPKPPVIITRESANALRAHILEIGNGCDVFDCIANYARRRXRGICILSGSGTVTNVTIRQPSATGXVFTLHGRFGILSLSGSV

SEQ ID NO: 111325 - protein, 83 aa, Gossypium hirsutum
  Clone ID: uC-gsronu33B049e08b1.pep
PKITGLFLEQKMLNWRLPMRRSEFETFKQILLCISLSLIFHPSLALSERVVSAGNPLILHSQQTDRAVACPNEWAYAWSNAWA

SEQ ID NO: 111326 - protein, 37 aa, Gossypium hirsutum
  Clone ID: uC-gsronu33B049f07b1.pep
LTRSRYLFMGYGNLKDGASEIEAPCLTDVLKHMYDES

SEQ ID NO: 111327 - protein, 106 aa, Gossypium hirsutum
  Clone ID: uC-gsronu33B049f08b1.pep
FFISYIFLQYFRDFFFNLWPSCLAVLGFPSFLSRAFAFFSFFLGPLNCLPFPWFLPCLPVKSLVFFALFPFPFFPFSSVALLPMGPRLFCLFHHFDFLIAVWFPPF

SEQ ID NO: 111328 - protein, 83 aa, Gossypium hirsutum
  unsure (1)..(83): unsure at all Xaa locations
  Clone ID: uC-gsronu33B049g10b1.pep
KKGRKKKRKKEGKKGKKRSKEKXKMKEKKKDNQKKKNTEKRRKAKRGGKERKKKRWKERNEREDQKRKRRQADKKKEKESEDQ

SEQ ID NO: 111329 - protein, 91 aa, Gossypium hirsutum
  Clone ID: uC-gsronu33B049h05b1.pep
LISSSSTLRNCLVEFTRLGLDQCNTRPKLHNTEDIKPENPDSPEQPSVRSNAKDRITNEPKSLQGLRILLAEDTPVLQRVATIMLEKMGAV

SEQ ID NO: 111330 - protein, 74 aa, Gossypium hirsutum
  Clone ID: uC-gsronu33B050b06b1.pep
LNQASFLYGKKKKKKKKKKNKKKKKKKKKKKKKKKKKKKKKKKKKKKKKKKKKKKKKRGGPFKRTKFNYPKKSN

SEQ ID NO: 111331 - protein, 77 aa, Gossypium hirsutum
  Clone ID: uC-gsronu33B050b12b1.pep
LNPARLFYFGGPLKKIFFFIPPEVNFGPLKGPPPFFFFINLFFFFFFFFFFFFFFFFFFFFFFFFFFFFFFFFLIFF

SEQ ID NO: 111332 - protein, 161 aa, Gossypium hirsutum
  Clone ID: uC-gsronu33B050d01b1.pep
PVCLLGTEFRKKVCWEILVAGSEQGIEAGQVGLRLITKGDRQTTVAKEWSISATSIADGRWHTVTMTIDADIGEATCYLDGGFDGYQTSLPLFVGTSIWEQGTEVWVGVRPPIDMDAFGRSDSEGAESKMHIMDVFLWGRCLNEDEVASLILLFAQLSLLD

SEQ ID NO: 111333 - protein, 117 aa, Gossypium hirsutum
  unsure (1)..(117): unsure at all Xaa locations
  Clone ID: uC-gsronu33B050d04b1.pep
QSKTTAYAAMTPTRPGLEEFEQQIHKIRITLCSMSVNILKKVCAYLLRVAKAKRLRVKGPERMPTMVLHMTTRTVYXGERTNTWDPIELREHKTRIDLFSSLDETDKLLASPYEPEL

SEQ ID NO: 111334 - protein, 79 aa, Gossypium hirsutum
  Clone ID: uC-gsronu33B050d05b1.pep
PILIRLVHLQSLRAALLATIYTSIYQWNILKLPKSCSSQGSTAPDGVVVVSSAYINGYCPKKVVISPPSVSEEIMSYKW

SEQ ID NO: 111335 - protein, 53 aa, Gossypium hirsutum
  Clone ID: uC-gsronu33B050f03b1.pep
FYQGQIAVLVPKFWLNLKFNFYTLIWHNLMVISRFWLLNYTCFLISVLQFFFV

SEQ ID NO: 111336 - protein, 73 aa, Gossypium hirsutum
  Clone ID: uC-gsronu33B050f07b1.pep
LLQAIERSCCTMINHVLTKCETMGRRCLLRSMGHETWIQELMSHVLERFIMIHASLELLLRSTGERETRNGFH

SEQ ID NO: 111337 - protein, 43 aa, Gossypium hirsutum
  Clone ID: uC-gsronu33B050g04b1.pep
LDSNSKLELFIQVDLNNSNSSIQLTQKLNIFSVFLIESNFSYT

SEQ ID NO: 111338 - protein, 91 aa, Gossypium hirsutum
  Clone ID: uC-gsronu33B050g08b1.pep
KRAKKKKGKKKKGEKYKKRQGKRSKKGGVKKRPKEKEPPNKKTPPPPGGKGPQKGRPPCQTTWKKGQEGQRGRAPNAKKPAEEKGFPPKAI

SEQ ID NO: 111339 - protein, 45 aa, Gossypium hirsutum
  Clone ID: uC-gsronu33B050h02b1.pep
LPYVRNRDTFFSPMLPPLQGPQLSIVIDTPVHQRLQGPVRSVATR

SEQ ID NO: 111340 - protein, 47 aa, Gossypium hirsutum
  Clone ID: uC-gsronu33B051b07b1.pep
LAIFNPHCNPRGELTSMLSFLTLRETHHIQGGQCGNQHQAHPETWTL

SEQ ID NO: 111341 - protein, 100 aa, Gossypium hirsutum
  unsure (1)..(100): unsure at all Xaa locations
  Clone ID: uC-gsronu33B051f01b1.pep
MAGAWVLNNGVYRLXTSLRKTGFLVHLPSGEVVSSYSSLEHILRGLGWERYYGGDPDLYQFHKHSSIDLISLPKDFSKFCSVHMYDIVVKNPNVFHVRDM

SEQ ID NO: 111342 - protein, 63 aa, Gossypium hirsutum
  Clone ID: uC-gsronu33B051g04b1.pep
PSLSKRSVIERSGSFLFITHQFCFPRYGVRLTLLQQPSNTPHLSPLAELSYLTSTPSTHFLTL

SEQ ID NO: 111343 - protein, 121 aa, Gossypium hirsutum
  unsure (1)..(121): unsure at all Xaa locations
  Clone ID: uC-gsronu33B051h08b1.pep
NGSDVEARIQRYKWKVKIDYKSPDCFKELVITIYGGTPGSKYRADNDTIIVELTNGLLTENVHVLLGIXQIGTPWFDGTERETQCPIIPGTTLKNQVCDDRAGTYLYHAHYGMQREAGLYG

SEQ ID NO: 111344 - protein, 39 aa, Gossypium hirsutum
  Clone ID: uC-gsronu33B055b01b1.pep
GVVNTATPIIAATIHRNCCDLNSTVFLPIAVAAGSTTTK

SEQ ID NO: 111345 - protein, 43 aa, Gossypium hirsutum
  Clone ID: uC-gsronu33B055c04b1.pep
KGPPPFFFFFFFFFFFFFFFFFFFFFFFFFFFFFFFFFFKFDT

SEQ ID NO: 111346 - protein, 51 aa, Gossypium hirsutum
  Clone ID: uC-gsronu33B055c10b1.pep
SSPMNIYTHHEPPSLNNVPSISLLHSYQVSILLELISLRSMPYGSSSCTRL

SEQ ID NO: 111347 - protein, 49 aa, Gossypium hirsutum
  Clone ID: uC-gsronu33B055e12b1.pep
LSTVDLTLGSPLSKPITTLDFVELVVFAFITIYTLLFIFIASLVLVYVK

SEQ ID NO: 111348 - protein, 54 aa, Gossypium hirsutum
  Clone ID: uC-gsronu33B055f12b1.pep
CMITSKHCHRLPFNPSLKFFRNILLTQIECSLTEDNNIYKQRGESSKRQLHHKF

SEQ ID NO: 111349 - protein, 111 aa, Gossypium hirsutum
  unsure (1)..(111): unsure at all Xaa locations
  Clone ID: uC-gsronu33B055g02b1.pep
NLICLSYIYKPRISFGAGAEVAVLCITKSGEVVNYQAFTNSKGIYTVAETMPESERRDACLARPIRSFHEHSNHLEDGSTGIKFTYNHPSDQFHVIRPFVXRPLTVPTYCI

SEQ ID NO: 111350 - protein, 34 aa, Gossypium hirsutum
  Clone ID: uC-gsronu33B055g07b1.pep
SHNTDPYAMHFSSYIPMDPTFIEKARLSVAAHML

SEQ ID NO: 111351 - protein, 95 aa, Gossypium hirsutum
  Clone ID: uC-gsronu33B055g10b1.pep
QFSPVRETPVKIEQPTQIMTPINNQTGLMQQPNYSSASQNFYQSQPPQYLLNQQPSASAVDYTTPNPTGMKMGGSNISNLIRHSSSPAGLFSNIN

SEQ ID NO: 111352 - protein, 106 aa, Gossypium hirsutum
  Clone ID: uC-gsronu33B055h04b1.pep
CYIFYTFLPNMAYFEFLPVKNEGDGSIEMKSNNEDTELVDLVNVKAGQCYELVVTTCAGLYRYKVGDVLMVSGFYINVPQFQFVERKNDILSVAHRKHMSNIPFQG

SEQ ID NO: 111353 - protein, 99 aa, Gossypium hirsutum
  unsure (1)..(99): unsure at all Xaa locations
  Clone ID: uC-gsronu33B057a03b1.pep
PLRSCITDLVSRLVLECEIIIDEVFPVEQEDEDXIVKEQREAITVAGKGIFRNTGAALLSMQEIRRGSSTYGHFSLTPMDLPDSDLIHCFQLNCRIPIV

SEQ ID NO: 111354 - protein, 153 aa, Gossypium hirsutum
  unsure (1)..(153): unsure at all Xaa locations
  Clone ID: uC-gsronu33B057b08b1.pep
FFASAKGEVPRGDSIEDDASNDDRSSLRTGLLGSEAVLVLELKSIADVGLVXGMPNAGKSTLLGAISRAKPAIGHYAFTTVRPNLGNLNFDDLSITVADIPGLIKGAYQNRGLGHAFLRHIERTKVLAYVVDLAVRLDGREGIPPWEQLKDLV

SEQ ID NO: 111355 - protein, 60 aa, Gossypium hirsutum
  Clone ID: uC-gsronu33B057d05b1.pep
SLIRLIRKQKFKLITKVPYSISKQVIISPTPHEVLKKKRTMKLIIIIIYSSIKRKKKSSH

SEQ ID NO: 111356 - protein, 100 aa, Gossypium hirsutum
  unsure (1)..(100): unsure at all Xaa locations
  Clone ID: uC-gsronu33B057e05b1.pep
MFGVVFPNRSFPMDISSFTQIDTFHWVLDMNTFVGESYHQIGDMCIFLLNNFTLPPDKALAVYVQSPGSPFVYCGAGTLXRPSAVLSLIWPEPGGQMQVT

SEQ ID NO: 111357 - protein, 105 aa, Gossypium hirsutum
  unsure (1)..(105): unsure at all Xaa locations
  Clone ID: uC-gsronu33B057g02b1.pep
PLFFKAFTVAATGGWTTAAPNVAKRIEVEAIPSSGTIVMINFVEGLPFXYMKHEIGGHVVNXFSYSYPVIEGGPLGNXLEKISFENKFEVAACGGSIRKSSMKFL

SEQ ID NO: 111358 - protein, 83 aa, Gossypium hirsutum
  Clone ID: uC-gsronu33B057g07b1.pep
EKQKHGLNQGGFFREAATFTLDDVWNHNGYAKQYSGSLWNTVATCQANDSAIVGPDYEKYERRLRSSSMLFLISRLRRGSSDI

SEQ ID NO: 111359 - protein, 79 aa, Gossypium hirsutum
  Clone ID: uC-gsronu33B057g08b1.pep
MGGVRWFVGVLFLSTLLLCSADVHHYEFFVRESKFKKMCNTSTLLVVNNSYPGPEIRVHRGDTVFVNVPNQMLMLSMDI

SEQ ID NO: 111360 - protein, 28 aa, Gossypium hirsutum
  Clone ID: uC-gsronu33B057g09b1.pep
TQQFNTHHRMLIILGANATLPTPFQVVT

SEQ ID NO: 111361 - protein, 73 aa, Gossypium hirsutum
  unsure (1)..(73): unsure at all Xaa locations
  Clone ID: uC-gsronu33B057h11b1.pep
MHSAAFYNDYCTLLAHSADHGAMVGYTGLTVXPXNGIQGYIPFNCIPEXHNKVLTSDRIGGKVALFYLIRQLF

SEQ ID NO: 111362 - protein, 46 aa, Gossypium hirsutum
  Clone ID: uC-gsronu33B058a02b1.pep
EQIQNAVRRMIEQLHAWYLVTAAAKLASRVIWTFHGDCIIAENYYP

SEQ ID NO: 111363 - protein, 145 aa, Gossypium hirsutum
  Clone ID: uC-gsronu33B058a09b1.pep
VRPKRSGTLAEYSVAEENLLALKPKNLGFIEAAAIPLAIGTAYEGLQKTALSPGKSILVLGGAGGVGTMVIQLAKHVFGASKVAATSSSAKLELLKSLGADLAIDYTKDNFEDLPEKFDVIYDAIGQSERAVKAIKEGGKVVTIE

SEQ ID NO: 111364 - protein, 149 aa, Gossypium hirsutum
  Clone ID: uC-gsronu33B058a10b1.pep
FLNSFIIATKTGSAEVFVFDYSKHPSKPPLDGACSPDLRLRGHSTEGYGLSWSKFKEGHLLSGSDDAQICLWDVNATPKNKALDAMQIFKVHEGVVEDVAWHLRHEYLFGSVGDDQYLLIWDLRTPSVTKPIQSVVAYQSEVNCLAFNP

SEQ ID NO: 111365 - protein, 29 aa, Gossypium hirsutum
  Clone ID: uC-gsronu33B058b04b1.pep
LNLLHNTTKKSFAGSQFRIHSIYNTFLVT

SEQ ID NO: 111366 - protein, 53 aa, Gossypium hirsutum
  Clone ID: uC-gsronu33B058b08b1.pep
SKNPPTRTGPRENLLSHRISKASNFGYGKPRSRNCSKELKVQRPGKESQISFA

SEQ ID NO: 111367 - protein, 146 aa, Gossypium hirsutum
  unsure (1)..(146): unsure at all Xaa locations
  Clone ID: uC-gsronu33B058c10b1.pep
VKFPKRYLIVLVSFVSTCVCYIERVGFSIAYTVAADAAGINQSSKGTILSTFYYGYACSQVPGGWAAQKIGGRQDLLLSFVLWSSTCFLVPLDPNRVTMLVVARLLVGVAQGFMFPSIHTVLAQWVPPHERSRSVSXTTSVMYLGA

SEQ ID NO: 111368 - protein, 52 aa, Gossypium hirsutum
  Clone ID: uC-gsronu33B058c12b1.pep
KLTTKLAERYVTQPFKNINKEEGLVKIQSEKFIFLLKNRKLNQINTSKYKLN

SEQ ID NO: 111369 - protein, 144 aa, Gossypium hirsutum
  unsure (1)..(144): unsure at all Xaa locations
  Clone ID: uC-gsronu33B058d04b1.pep
MATEEESIEQXFASRRELLKALKAAQELLNAPDEDSSQAAENQTDDTNEENNPSMKFRNYVPHDKQLQEGKVAPPVLPKFEDPVAAEPPASEEKEDPFVNIAPKKPNWDLRRDVQKKLDKLERRTQKAIFKLMEQQEQEKQLDE

SEQ ID NO: 111370 - protein, 145 aa, Gossypium hirsutum
  Clone ID: uC-gsronu33B058e03b1.pep
LLFLSLGLPPSVSSNLPEPLWYILMTPILCLELKIYGQWMSGGQRRLSKVANPSNHLAIVGNFVGALLGASMGLKEGPIFFFAVGLAHYLVLFVTLYQRLPTNETLPKELHPVFFLFVAAPSVASMAWAKIRGSFDYGSRIAYFI

SEQ ID NO: 111371 - protein, 80 aa, Gossypium hirsutum
  Clone ID: uC-gsronu33B058f02b1.pep
ILIRHIFYNKEWILEIHKQKIGHKEQKSDHVTHLFQGLKHSTSMEMGPSEHSTTGDLTRVTLLTKAPADSVELFFSDRTT

SEQ ID NO: 111372 - protein, 40 aa, Gossypium hirsutum
  Clone ID: uC-gsronu33B058f06b1.pep
KGRNPKDRGLGDWQYVGGPLGVTNATFGFNCAYKGARPFS

SEQ ID NO: 111373 - protein, 87 aa, Gossypium hirsutum
  Clone ID: uC-gsronu33B058f07b1.pep
LGTRLMHLGMLFCKAIFIKNVYMVKKTCFFFCTFGILRPLQHWLRNLLLDKLVVIFAFPMQFSFLNFNACCTNLAYFLWLLLCRFRF

SEQ ID NO: 111374 - protein, 44 aa, Gossypium hirsutum
  Clone ID: uC-gsronu33B058f11b1.pep
KGPPILFFLFYFFFFFFFFFYFFFFYFFYFFFFFFFLKPKYKIK

SEQ ID NO: 111375 - protein, 63 aa, Gossypium hirsutum
  Clone ID: uC-gsronu33B058g01b1.pep
VLVKVIVRDRLIEPLSCPIAWICHAQKKKVRVKDNPKHCLGTFGCNRHMLLKNPRTKDDVQLG

SEQ ID NO: 111376 - protein, 151 aa, Gossypium hirsutum
  Clone ID: uC-gsronu33B058g09b1.pep
LSRVRPRVRNDGWLCHSFGGQCFNYTAFQPAIDVLKEVRVFLEANPLEIVTIIIEDYVTSPRGLSKVFDAAGLRKFWFPVSRMPKNGENWPTVDDMVQKNQRLVVFTSKSAKEASEGIAYQWRYMVENQYGDGGKVACSWPNRAESPVMKH

SEQ ID NO: 111377 - protein, 108 aa, Gossypium hirsutum
  Clone ID: uC-gsronu33B058h01b1.pep
KEKISEKFYRRCGRSMSKLFYKFPVSTDPIKFTEMELIADEDVETMVAVYCGTRSNRNAPIQLFDELAGIEATEDPTSLSKEDGAQEPCMVVPISNVDSQSDAWADAK

SEQ ID NO: 111378 - protein, 65 aa, Gossypium hirsutum
  Clone ID: uC-gsronu33B060a01b1.pep
DHLHAKNCVGQMERFLESQMDGVTYILNLVTTWETLQPAVLIIVAVEPHKDSIVQSARPYGERAV

SEQ ID NO: 111379 - protein, 48 aa, Gossypium hirsutum
  Clone ID: uC-gsronu33B060a04b1.pep
WWFDCHIEESEQHVNIVNLDMKSIGISRYTDRRRACMILMKDYLKHTP

SEQ ID NO: 111380 - protein, 128 aa, Gossypium hirsutum
  unsure (1)..(128): unsure at all Xaa locations
  Clone ID: uC-gsronu33B060a08b1.pep
LSSILTSSHTFVSIWHDMTHASDIXWPSLQTQACLPQCXLKGEITSMRXPKFLMAEKVIHLTYATPLISTHMRSSTADEIVYXILLLVLADGCVVCTHNVSGSRAYRESQTECGKVTALTIPSYMTEL

SEQ ID NO: 111381 - protein, 72 aa, Gossypium hirsutum
  Clone ID: uC-gsronu33B060a09b1.pep
TSSDSVYSTCSQRLLLFCNRNDKAHHGSLAHHMCSHCGRCNPNSGRAWEALGPSIESDICLSVIKSVRQNNK

SEQ ID NO: 111382 - protein, 37 aa, Gossypium hirsutum
  Clone ID: uC-gsronu33B060a11b1.pep
MVPISRIPNSFLRVAFASGAPYIALMVSAFGLLVLKR

SEQ ID NO: 111383 - protein, 88 aa, Gossypium hirsutum
  Clone ID: uC-gsronu33B060b04b1.pep
PSWLWVKVCLGLTKADLIHVIDVHVGTLMASPSICSDGSSSSLTFSARLSYLLESDTPKRVLAYFGKDTDRAVDESSPFSHEGDDELS

SEQ ID NO: 111384 - protein, 72 aa, Gossypium hirsutum
  unsure (1)..(72): unsure at all Xaa locations
  Clone ID: uC-gsronu33B060b07b1.pep
MCEGDDQIPTALDAYADANAEDSRAGAMEHVHFRIQQKNGRXSLTTVQGLXKEFSYYMILKDLXKELCCNGT

SEQ ID NO: 111385 - protein, 92 aa, Gossypium hirsutum
  unsure (1)..(92): unsure at all Xaa locations
  Clone ID: uC-gsronu33B060c01b1.pep
MMGGYSRAIVSLSDELTEVGCRTSSPRITGDALVTRTLETNSCSLSMHMGDHVQLAYVYHTEDSXQRRSLAVKDESFCSLEGALDYLWRLEH

SEQ ID NO: 111386 - protein, 65 aa, Gossypium hirsutum
  Clone ID: uC-gsronu33B060c04b1.pep
PCRPTRAPFFHSSSLSRRRKRVSDGIADLTAAAVTTGHAPRTLALDILRRRPAVRPCSTDLNQHR

SEQ ID NO: 111387 - protein, 121 aa, Gossypium hirsutum
  unsure (1)..(121): unsure at all Xaa locations
  Clone ID: uC-gsronu33B060c07b1.pep
SSCPGRNLFFLCDEFFVVQSPWLLSRILKELMDLQXKDPPTSCSAGPVAEDMLHWQATLMGPXDSPYAGGXILVTIHLPPDYAYKPSKATFRTKVFHSNINMNGSICLDILTEQWTPALTI

SEQ ID NO: 111388 - protein, 97 aa, Gossypium hirsutum
  unsure (1)..(97): unsure at all Xaa locations
  Clone ID: uC-gsronu33B060c08b1.pep
MAHYNLKGKVKLAHGDXIQRNSFMSRSKAXGCPTILQFGADTGGPMLYEGARAASXIESLALEQLQTNVRPAGVTAGTVPDGMQDKCVLADIRFAGF

SEQ ID NO: 111389 - protein, 82 aa, Gossypium hirsutum
  Clone ID: uC-gsronu33B060c11b1.pep
HVGHLSQKQHRLDRHQALSNLCTQVLSESSVLVCIWLISPSSASACGSKSRLARLALAQRMLLDQQFPAMVDQVCQLSSHQP

SEQ ID NO: 111390 - protein, 47 aa, Gossypium hirsutum
  Clone ID: uC-gsronu33B060d02b1.pep
LLHNHYQVPPPSPPPLPYPEVPPALAPPPPLPPPAPSPIYPNRKTEG

SEQ ID NO: 111391 - protein, 61 aa, Gossypium hirsutum
  Clone ID: uC-gsronu33B060d06b1.pep
ALVYFTRSDLRGLTQQAAFKQEECTAMVGVSAGRARSLCNSESRNGRPLGINLFPSIEREG

SEQ ID NO: 111392 - protein, 96 aa, Gossypium hirsutum
  unsure (1)..(96): unsure at all Xaa locations
  Clone ID: uC-gsronu33B060d12b1.pep
FPGLTYLLTVMMGPERENWFKSERQAMVGGTLICAYGPILMMLFRXTSLIGQKDAHLALNDISTRGQPDPCGWLESTILRLGLEHWHIGGLCLIGN

SEQ ID NO: 111393 - protein, 55 aa, Gossypium hirsutum
  Clone ID: uC-gsronu33B060e01b1.pep
LGQRTHICEMMTLVFQDEPRDDIWCPGNKSLTDCHIGCFSASTYRDSLAIRCFRP

SEQ ID NO: 111394 - protein, 77 aa, Gossypium hirsutum
  unsure (1)..(77): unsure at all Xaa locations
  Clone ID: uC-gsronu33B060e08b1.pep
MHTDHGRIGDLYIARVCMATNNXITCEAHAAEHYTVGNWDXPAAYTGTLFTLGICGFVRSQADDDSTLDRLWVNRKA

SEQ ID NO: 111395 - protein, 101 aa, Gossypium hirsutum
  Clone ID: uC-gsronu33B060e10b1.pep
PGFLIIVNVLVQSQTRRGPWTLRYGMPASICTQASCVPAWPPSPLAGQSACAWIIMSYRSAFSSYTQITKKCLVHQSLEPSSDNRPYQIFLLVDNFNVPIA

SEQ ID NO: 111396 - protein, 83 aa, Gossypium hirsutum
  unsure (1)..(83): unsure at all Xaa locations
  Clone ID: uC-gsronu33B060f10b1.pep
LFLPGGMQIFRKTITDKTITLEVESSDTIANVKARIHDRERIPPEQERLIMAGKQXEDARTVGEYNIKKECTIDLELGLRGGH

SEQ ID NO: 111397 - protein, 36 aa, Gossypium hirsutum
  Clone ID: uC-gsronu33B060g03b1.pep
NDYKPVCLHTILVKQGIQLQVSISAHVQAQSNEKMV

SEQ ID NO: 111398 - protein, 46 aa, Gossypium hirsutum
  Clone ID: uC-gsronu33B060g04b1.pep
HLLCFNPLHFRHVSRYGCHPALTFHNGHKPISLSHSFLRQEMQIPG

SEQ ID NO: 111399 - protein, 59 aa, Gossypium hirsutum
  unsure (1)..(59): unsure at all Xaa locations
  Clone ID: uC-gsronu33B060g07b1.pep
FNPADSSVKFSPRVFSCSRKSRKAHLTGPSTGRRVLLSXPLSFYLKFKNNVRSMPVRKC

SEQ ID NO: 111400 - protein, 50 aa, Gossypium hirsutum
  Clone ID: uC-gsronu33B060g11b1.pep
LEKLRRTRSYHSKLKTRYLERFKTYSGSMQLDNSWMNARYFDKKKAAKIT

SEQ ID NO: 111401 - protein, 37 aa, Gossypium hirsutum
  Clone ID: uC-gsronu33B060h01b1.pep
PLYPVHAIIFSSTAHINLRIHSCLADARRSGCFTCEN

SEQ ID NO: 111402 - protein, 85 aa, Gossypium hirsutum
  unsure (1)..(85): unsure at all Xaa locations
  Clone ID: uC-gsronu33B060h08b1.pep
ALLKAAQPKKTLKTKDKAEDEESDEDKDDEDKEKKNXKEGEEDDKPKGPSTLSKLTPEEAEHRALQAAVLQEWHMLCKDRSMKVG

SEQ ID NO: 111403 - protein, 139 aa, Gossypium hirsutum
  Clone ID: uC-gsronu33B061a08b1.pep
LLPILSSSQKVVFIFHDLMHGSDISWRILQKKLCLPQWNLISEISRQCLHNFLLSEEMTHRNNESPLISTHLRSPNVQEFLYSILFLLLVAGYLVRTHLLFVSRAYSELQTEFEKVKSLMIPSYMIEWRKLLDRYSTSE

SEQ ID NO: 111404 - protein, 45 aa, Gossypium hirsutum
  unsure (1)..(45): unsure at all Xaa locations
  Clone ID: uC-gsronu33B061a10b1.pep
GLTAQDLVQRCFKGECGHTEPVHAGAGGVGSLXCQRANAVDATVI

SEQ ID NO: 111405 - protein, 62 aa, Gossypium hirsutum
  Clone ID: uC-gsronu33B061a11b1.pep
IIFGALEKKTIPANAWRILERGTTDLGASFVHMGLLIHVHMDCVLIYMSSFNLSFSVSVYII

SEQ ID NO: 111406 - protein, 101 aa, Gossypium hirsutum
  Clone ID: uC-gsronu33B061b01b1.pep
KRGGPNANQGKQQVERENRAAPMGNNPTEKKGEVSKTQKVGKAKGGPNTTVEKWGQPKVIKAPQKKKKNRQAHGGNTGTQKRAPPRRGKKQGTPKTAALNF

SEQ ID NO: 111407 - protein, 53 aa, Gossypium hirsutum
  Clone ID: uC-gsronu33B061b10b1.pep
IGDVVPCRPISTDGFKHRITRRTFLSSLLSIEKSFYLNSRFGKRYLPAAAGST

SEQ ID NO: 111408 - protein, 67 aa, Gossypium hirsutum
  Clone ID: uC-gsronu33B061c01b1.pep
TVIVREQKSRQKKHNRMCTKELALAFLLLTAAARSLLSAQGIHWYFLLFQGISLLLAGLDLIGEQGL

SEQ ID NO: 111409 - protein, 154 aa, Gossypium hirsutum
  unsure (1)..(154): unsure at all Xaa locations
  Clone ID: uC-gsronu33B061c02b1.pep
VVLGSSLTMEKVAAAKQFIENHYRAQMKNIQERKERRWVLERKLAASDVPKEEQINLIKDLERKETEFMRLKRHKICVDDFDLLTIIGRGAFGEXVRLRREKKSGNIFAMKKLKKSEMLMRGQVEHVRAERNPLAQVASHCIVKLYYLFQDAEY

SEQ ID NO: 111410 - protein, 46 aa, Gossypium hirsutum
  Clone ID: uC-gsronu33B061c04b1.pep
NAHKFICLVYFPNGREVQCLGWHPNSKSLFVNIYVFHNSQCYDVDN

SEQ ID NO: 111411 - protein, 56 aa, Gossypium hirsutum
  Clone ID: uC-gsronu33B061c08b1.pep
FHASAHASGKRLAPEWKMAANNLKGKVKLFHSELKEERSFIDSYMVQGCPTMIRSI

SEQ ID NO: 111412 - protein, 62 aa, Gossypium hirsutum
  Clone ID: uC-gsronu33B061f05b1.pep
NEQVQEKQIRQDYACNLATYNGGFVVKYDVLIQAGEKQFCHPSVSGKLSWGNCPLCACKCLF

SEQ ID NO: 111413 - protein, 155 aa, Gossypium hirsutum
  Clone ID: uC-gsronu33B061f11b1.pep
FFNPFVKGPPVGINLSMDFRQFFVVVFALFNLINFASTTDVAITFGQVSNLNLCTTDLANNGVDFQVSDLTITFEVSYNLTFSCLYFTSIEISDQTQTPVYLTYYFASNQARNNYLVEMSCLTNVNLLLKDNALVFSPVVLNTPSCSPTCIIMVT

SEQ ID NO: 111414 - protein, 80 aa, Gossypium hirsutum
  Clone ID: uC-gsronu33B061g08b1.pep
EKGAAKTKICVHWVRSRGVETQSLKDGSTEIRNRRRRSRANGQSIRQDGAPTPSFFGQMSPDRCLPDDLEEPSWGSLDLF

SEQ ID NO: 111415 - protein, 45 aa, Gossypium hirsutum
  Clone ID: uC-gsronu33B061h06b1.pep
ARQEGYLPIPDSPHVITDYARMFPGRHIPWQSDSRTCIIQTQCHH

SEQ ID NO: 111416 - protein, 52 aa, Gossypium hirsutum
  Clone ID: uC-gsronu33B061h10b1.pep
CVSGLPLNCCVLWTKPQIQCPLPVLPLEYRKSNILAANIQLSPNVNQVQRIQ

SEQ ID NO: 111417 - protein, 132 aa, Gossypium hirsutum
  Clone ID: uC-gsronu33B062b03b1.pep
HFVRLFAFSPGGVLLASPMANHGILGDCPCPRHERRSVLGETDPFGPPPNGVEDGAFTAHHDRREKGRPLSVRRSLPRPLAEPPGVQRPSNRRGNAGASPNSESEVSRDARKRRRPGVWWPRHAAAEACKGL

SEQ ID NO: 111418 - protein, 70 aa, Gossypium hirsutum
  Clone ID: uC-gsronu33B062e08b1.pep
FYASVHASAYLDNAVVFIGSCYGDSQLIKLNLQPDAKGSYVEVLEWFAILRSYCCLFAWFHPYSYAFSLS

SEQ ID NO: 111419 - protein, 43 aa, Gossypium hirsutum
  Clone ID: uC-gsronu33B062e09b1.pep
YGALIWSTQGGGESQTRAVSVRGNTKKPKFYPIEWAQGTTQGG

SEQ ID NO: 111420 - protein, 57 aa, Gossypium hirsutum
  Clone ID: uC-gsronu33B062f09b1.pep
VTSYSSLSGVHIMICVQKHHHSLSSILSLRYISHPQGVSKALRPLWLDTVGIPSRTR

SEQ ID NO: 111421 - protein, 146 aa, Gossypium hirsutum
  Clone ID: uC-gsronu33B062f12b1.pep
FTRPESSRPSFSSITKTAGFLDKELAASGFTRKDEDDIQKFIEGDVEEDDVSDGEHDSELCQTNIKGFDSLHLDQEESTSRCNEEGQVVENLQSPEVGQRGDPESQNLSSNEGDENDDTELVKSLAKHRRRAMAAARKGHHKNSTS

SEQ ID NO: 111422 - protein, 74 aa, Gossypium hirsutum
  Clone ID: uC-gsronu33B062h12b1.pep
IARSTQPFFSFGQATVPAGGSSLGIWGPYPVQELCNLIELHKRNMALINMGFRFSAPEYFPTHDGSFRQYVSRP

SEQ ID NO: 111423 - protein, 43 aa, Gossypium hirsutum
  Clone ID: uC-gsronu33B072a05b1.pep
RAWLRFGYRIGHLESVGSLAFFLRRGHQRTRVKHLLSETGSVV

SEQ ID NO: 111424 - protein, 37 aa, Gossypium hirsutum
  Clone ID: uC-gsronu33B072a09b1.pep
CSIHYQFPSISAFSLKSNGSSKHPAQYPSSTPLTPIS

SEQ ID NO: 111425 - protein, 52 aa, Gossypium hirsutum
  Clone ID: uC-gsronu33B072b10b1.pep
MMMMSSSSRHNEKDQLFHILHKVPQGDTPYVKAKHAQLVEKEPEAALVLFLE

SEQ ID NO: 111426 - protein, 35 aa, Gossypium hirsutum
  Clone ID: uC-gsronu33B072d01b1.pep
ASTPKLTNLSAFNLGKRGDTTILLPVNSVTRTHTQ

SEQ ID NO: 111427 - protein, 64 aa, Gossypium hirsutum
  Clone ID: uC-gsronu33B072f08b1.pep
KKRKIYKRRRTMIHNHQFFSSLSKFEFPFFSSFCCVDKYMKFLALFSLEFEFPFKYQRDCEKYR

SEQ ID NO: 111428 - protein, 41 aa, Gossypium hirsutum
  Clone ID: uC-gsronu33B072h08b1.pep
VRVLAKAVHLNQASVLSVHGPPAMTASISHVSRGTFRTRER

SEQ ID NO: 111429 - protein, 34 aa, Gossypium hirsutum
  Clone ID: uC-gsronu33B073f01b1.pep
PIKDYKDKIRGENHVRCHLNVNYYGSFTISIVVE

SEQ ID NO: 111430 - protein, 70 aa, Gossypium hirsutum
  unsure (1)..(70): unsure at all Xaa locations
  Clone ID: uC-gsronu33B074c06b1.pep
FCRHSQIQEKKFEILMPGSEIPEWFSQQRSDSSIKIPVSKDSQWIGVACCCIFVNNDASRDDESIGXGAF

SEQ ID NO: 111431 - protein, 136 aa, Gossypium hirsutum
  unsure (1)..(136): unsure at all Xaa locations
  Clone ID: uC-gsronu33B074g10b1.pep
FGFLFLFSFLSVNFYNYLYIYFIFNYILIFYSSIFFYYFFFIIILLFILFFFFFFFIFLLFIYYFIFXYFHNYYLLIIIIISIKLIFYIFILYFYLPLYTYSNFIFLYYFLFIIIFNLFIIIFILSYILFLIINIY

SEQ ID NO: 111432 - protein, 119 aa, Gossypium hirsutum
  unsure (1)..(119): unsure at all Xaa locations
  Clone ID: uC-gsronu33B076a02b1.pep
MSNSHSDTIPLHPSSQSDIDEIENLINASVQSGPATVLPARPPSPPRASIPVSSSPFIQSKIPPPPPQSSSSSNHKVPSVPAAPPXXPPVGNSSSIVATGFGPPSNTLTEPVWDTVKRD

SEQ ID NO: 111433 - protein, 69 aa, Gossypium hirsutum
  Clone ID: uC-gsronu33B076b05b1.pep
IQTKGEKSKVLAHRIFAVQDLNHQVGTWHYILKTIDRINFSIFPVWNTCTDMTSVRVIFFGVNATKIDR

SEQ ID NO: 111434 - protein, 94 aa, Gossypium hirsutum
  Clone ID: uC-gsronu33B076b09b1.pep
IESRTELKSETLLTNLLREKLYSKELEVEQLQAEVAAGVRGNDILLCESQNELDHLFCLNHRLKDLVHAPRSRMHSSFADSPPSRCPHTKFFSP

SEQ ID NO: 111435 - protein, 122 aa, Gossypium hirsutum
  Clone ID: uC-gsronu33B076d08b1.pep
PLVRFFFGGMPPATTQFRSFNFGPGMGARMGDQGSTGFNIRMLIQLLPVLLILLFSFLPSSEPVFSLSRSYPYEYKFTTKNGVNYYVRSTKFEQDYPTNSVERVRIEERVERDYYSVLAHNC

SEQ ID NO: 111436 - protein, 60 aa, Gossypium hirsutum
  Clone ID: uC-gsronu33B076e04b1.pep
VQPNLLNITQITLAYLLLNFLTLRFLITFQSSVDSFLISTHTYKPIFNFFNYGFKSQGFL

SEQ ID NO: 111437 - protein, 41 aa, Gossypium hirsutum
  Clone ID: uC-gsronu33B076e10b1.pep
CFPYNCTLSSSIDIVAFDCFWVFYRLLTLASCLCFELYIGF

SEQ ID NO: 111438 - protein, 91 aa, Gossypium hirsutum
  Clone ID: uC-gsronu33B076f09b1.pep
SLFRLDLGGIANPMFRGKGPEMVKDNYSPAFPLKHQQKDMRLALALGDQNAVSMPVAAAANEAFKKARSMGLGDLDFSAVYETVKLLKHSS

SEQ ID NO: 111439 - protein, 66 aa, Gossypium hirsutum
  Clone ID: uC-gsronu33B076g01b1.pep
EHYLSSTDMNHSPSVNVQLSLECIVSSPDVMTIPTVGADETRQDYETVELEKIELRDPKIVNGNQM

SEQ ID NO: 111440 - protein, 49 aa, Gossypium hirsutum
  Clone ID: uC-gsronu33B076h03b1.pep
SFAPSFICLLSFVYLVAFFLRGTVAFSIYRCRFPHPRVYTYSLDNSSVA

SEQ ID NO: 111441 - protein, 47 aa, Gossypium hirsutum
  Clone ID: uC-gsronu33B077a09b1.pep
PSSERNGRKGLGAYSEKVSKGYAKRKDRPQNLSFLDHIRIFISSPSD

SEQ ID NO: 111442 - protein, 37 aa, Gossypium hirsutum
  Clone ID: uC-gsronu33B077b10b1.pep
FIQSLGTISHHIIWVNTHNLMACLLYPIILINFKFRD

SEQ ID NO: 111443 - protein, 186 aa, Gossypium hirsutum
  Clone ID: uC-gsronu33B077c01b1.pep
PTLPPTRPPTRPQPSLISLQWFSILLACISLFSWTIFAVSPDAPLTLDYYKSTSPTVFEIARKEMECEVNSDPRNAALVLRLHFHDCFVQGCDGSVLLDDTISLQGEKKASANVNSLKGFEIIDRIKNKLESECPGTVSCADILTVAARDAVILVGGPYWDVPVGRKDSKTANYDLVRENIPTAYE

SEQ ID NO: 111444 - protein, 43 aa, Gossypium hirsutum
  Clone ID: uC-gsronu33B077c07b1.pep
GVLHTPFLTSRVPAHCFMAVSRECITIDVLDLIQKWYSYARKT

SEQ ID NO: 111445 - protein, 136 aa, Gossypium hirsutum
  Clone ID: uC-gsronu33B077c10b1.pep
LFLPYHTHVTTELVGTLGYIPPEYGQAWVATLRGDVYSFGVVMLELLTGKRPVDMSRPKTSRELVSWVQRLRSEGKQDEVFDPLLKGKGSDEEMLQVLDVACLCINQNPFKRPTIQEVVEWLTGVGTINRNQNKDS

SEQ ID NO: 111446 - protein, 164 aa, Gossypium hirsutum
  Clone ID: uC-gsronu33B077d06b1.pep
CFPVNTKVNYRDGVIASSKTLKRGCYSQVEAHAAAGQKLRAVERNERLYRLVAANPSVLEQVDAVALPRDMLGEKYVHSSLNDKTGLSEVHGDWRKPNGAVGCYFAETNDADSVTCSVGSCSVSSNNFCRLPHCVPTGPIEVADGQCSDAESFCPRGDEGGNSL

SEQ ID NO: 111447 - protein, 172 aa, Gossypium hirsutum
  unsure (1)..(172): unsure at all Xaa locations
  Clone ID: uC-gsronu33B077e04b1.pep
DLITFSLEAKRAATWDEEFDHLRFSYNGNVIVVPEGHLSSWKSPESDLTVERTSDKNSVLVTLPDIAEISVNVVPVTREDDRIHNYQIPSDDCFAHLELQFKFYGLSSKVEGVLGRTYQPDFMNPAKPGTAMPIVGGEDKYRTSSLLTADCYTCKFPPARAXDQRDSSLMDY

SEQ ID NO: 111448 - protein, 41 aa, Gossypium hirsutum
  unsure (1)..(41): unsure at all Xaa locations
  Clone ID: uC-gsronu33B077f01b1.pep
LLXSGLFLQACLVMFPSCFCHCRSSRLCKIYIFGLKKIRAC

SEQ ID NO: 111449 - protein, 99 aa, Gossypium hirsutum
  Clone ID: uC-gsronu33B077f08b1.pep
RSISHAIVKLGRKDLDPQGEGSSSADINEEMEEEVEEGKVEESEDDGRGGGDDEIDGHDQEKTEGEESEEVEDFIDEEDKDKENQLEDLSLLEDQSMRS

SEQ ID NO: 111450 - protein, 54 aa, Gossypium hirsutum
  Clone ID: uC-gsronu33B077g01b1.pep
PLFFFFFFFFFFFFLKCNIIGRNVTITSDNIKFANKNFWATDKTSLTMNTYISR

SEQ ID NO: 111451 - protein, 94 aa, Gossypium hirsutum
  Clone ID: uC-gsronu33B077h01b1.pep
RDIFSRFREASKIATVKDGWVKQAPQGLEGSAQGLGCMGMSAFHGPPKPESAMIALIHHAIDSGITLLDTPDVHGPHTNEILPGKALKDGARER

SEQ ID NO: 111452 - protein, 51 aa, Gossypium hirsutum
  Clone ID: uC-gsronu33B077h09b1.pep
ICCYFFLLLLEVFDLLSSNYWCVMEYFLGLPALLLDLDLTIFIFVCVCIFF

SEQ ID NO: 111453 - protein, 100 aa, Gossypium hirsutum
  unsure (1)..(100): unsure at all Xaa locations
  Clone ID: uC-gsronu33B077h12b1.pep
MSSNGTDNSTSKKPASPSPLRFSKXFQSNMRILVTGRADIIGSHLGEKYMEHDWTEETGDANLLTDSTGRRMTEMETDRCYLLRNVRSMATIIEADEREC

SEQ ID NO: 111454 - protein, 120 aa, Gossypium hirsutum
  Clone ID: uC-gsronu33B078a04b1.pep
MVVYVNLERPLVSQILINGKTQRVEYELLLMVCFHYGRYGHVKESCTFRNSELNAKKKPAPPELLPKNHSMVVDRPEEKGKNYGPWMHVERKPRWKFRDIAQKNVDIQEKHMEGSRLRSL

SEQ ID NO: 111455 - protein, 83 aa, Gossypium hirsutum
  unsure (1)..(83): unsure at all Xaa locations
  Clone ID: uC-gsronu33B078b04b1.pep
HASAHASGSLIGKGSRNIQXTPGGPIDRQRLYNMAAETGACFLATAYSEYVTLYRGSQKCAAATETPCRLIIDGTNKGSAEII

SEQ ID NO: 111456 - protein, 41 aa, Gossypium hirsutum
  Clone ID: uC-gsronu33B078b05b1.pep
LIHQFNLPLMHQNKNCYYRCLHISVDNPTRRSTPMRRRGYL

SEQ ID NO: 111457 - protein, 145 aa, Gossypium hirsutum
  Clone ID: uC-gsronu33B078c01b1.pep
LIEGGEESFFAFGGVPVSSGSLKSPCWGRPRGVPGRSRLRQGSRRGGFGGPFACGPGVLSGVFSWPIPWRLRCGLWSLVWADLVPLGRSFLFSVVFFCCCCTCGCCWPRPFGRPVFFFVFGFFFLNFFFYFPPFFFFFFFFLYIL

SEQ ID NO: 111458 - protein, 94 aa, Gossypium hirsutum
  Clone ID: uC-gsronu33B078c03b1.pep
EKCYECCELIMEWATRVEGNQSNKRRFSSIPGSPNGVMDVSFSSDSSNDSWAVASFASVSSSPEPMSKKTRTQQDQLLERLSHHAPSDFLTIPH

SEQ ID NO: 111459 - protein, 141 aa, Gossypium hirsutum
  Clone ID: uC-gsronu33B078c05b1.pep
AKGKGPLGGNTQTAGVKGPEQGGAQWPIRLGKGWERRPGGGPSVINHPGKRGSGAKPIRWGTPGVSQAKGWKTPGSEMKLGATKKELKRCKHAEVNMGTPKTAAPVILCPFILFFLFFFLKFFLNFFFFFFFFFFFFNIIS

SEQ ID NO: 111460 - protein, 105 aa, Gossypium hirsutum
  Clone ID: uC-gsronu33B078c06b1.pep
PTLSACNSYVGTCAYMSPERFDPDANGGNYDGFLGDIWSLGLTLMELYVGHFPFLQAGQRPDWATLMCAICFGDPPSLPPGASDEFRNFMECCLQKESSKRWTAS

SEQ ID NO: 111461 - protein, 136 aa, Gossypium hirsutum
  Clone ID: uC-gsronu33B078c12b1.pep
NFSLSLTFANRKPCYFNTGVMVIDLDRWREGDYTTKIEEWMELQKRIRIYELGSLPPFLLVFAGNIVPVDHRWNQHGLGGDNFRGLCRDLHPGPVSLLHWSGKGKPWARLDANRPCPLDALWAPYDLLQTPFALDS

SEQ ID NO: 111462 - protein, 62 aa, Gossypium hirsutum
  Clone ID: uC-gsronu33B078d07b1.pep
LNYLLKLIYQSIPSPLLLKIHFSTTLPNIKTWFNFLTKLLIYIKIITKIQQLKYIFIYKTNS

SEQ ID NO: 111463 - protein, 56 aa, Gossypium hirsutum
  unsure (1)..(56): unsure at all Xaa locations
  Clone ID: uC-gsronu33B078d08b1.pep
QHSPVEGPVNNSGWNRSKSTSSQNSELCAIATDEDYXTXPPPALYPHALTCSGHTR

SEQ ID NO: 111464 - protein, 81 aa, Gossypium hirsutum
  Clone ID: uC-gsronu33B078e06b1.pep
YCLEIQVFFRVIYVSIFFHVCIYQCSIYVCSFTVSLLFYSFFISLNLLFIESRKLSKEIRSRPCQRSICSYSLLFYYVVIM

SEQ ID NO: 111465 - protein, 43 aa, Gossypium hirsutum
  Clone ID: uC-gsronu33B078f02b1.pep
GLIPDHHSIVINLGSGFFIFPLIVTVCWMDRATGINSGSGFSI

SEQ ID NO: 111466 - protein, 105 aa, Gossypium hirsutum
  Clone ID: uC-gsronu33B078f06b1.pep
MASSSSSELTLDCKPHGHFAAPSKCYADQQQIVVVNHTLKLEDYLSRLEEERLKIDAFKRELPLCMQLLTNALESSRQQLQAYRANQGPKPVLEEFMPLKTSVSE

SEQ ID NO: 111467 - protein, 30 aa, Gossypium hirsutum
  Clone ID: uC-gsronu33B078g03b1.pep
SLELKTNYYIKNCYRLYTKSTQEMKTSTIN

SEQ ID NO: 111468 - protein, 107 aa, Gossypium hirsutum
  Clone ID: uC-gsronu33B078g06b1.pep
VSLLLQLVWSICIFYWHQQQICHCRLSASAIIFSSPPVPFGVFIVHNIPSPLDHLIYLSQLNPFNTIAPQVASRWCMILLEASRVMSSFPVCASPKVTAGVVCSPRK

SEQ ID NO: 111469 - protein, 87 aa, Gossypium hirsutum
  Clone ID: uC-gsronu33B079a04b1.pep
RFYSHPSAHVRALRPFVRRFFVHIASINSKSKVEINGICGASYQVFNIGAINWQTDIDKCSTREVYSQLARGMTILWLDTAAKELGS

SEQ ID NO: 111470 - protein, 102 aa, Gossypium hirsutum
  unsure (1)..(102): unsure at all Xaa locations
  Clone ID: uC-gsronu33B079a10b1.pep
MITIYIAKRGLGRSKXIKKAIEKLGLKHKKHTAAYGEGXKRRLTGRHETTAINTFLWGVTNRGASIRVGRNTYKSPKRYIQNSRPPSNMDPHVVTPMIAQTT

SEQ ID NO: 111471 - protein, 110 aa, Gossypium hirsutum
  unsure (1)..(110): unsure at all Xaa locations
  Clone ID: uC-gsronu33B079b02b1.pep
RCFHRWYQNEGQEALFEPDCCDSRELEEGLGNSQTECPGQCXWAIEQTIYGRQTTPEVAANGDXAIDGMIITSATLEGDTVTNPGNSTYVQGPADAPMEDVSGCTVNFGT

SEQ ID NO: 111472 - protein, 68 aa, Gossypium hirsutum
  Clone ID: uC-gsronu33B079b03b1.pep
GKIISDDRKKRKQEPSANKPLLFEDEPCVQSNSRQRLNNICYHKGTDCVHDRMHIFTHYMANNGINLG

SEQ ID NO: 111473 - protein, 44 aa, Gossypium hirsutum
  Clone ID: uC-gsronu33B079b05b1.pep
FYIPSFYVNLSTYIYYAFINSSLFWKMSYTTLTSKFHFVLYMFC

SEQ ID NO: 111474 - protein, 80 aa, Gossypium hirsutum
  unsure (1)..(80): unsure at all Xaa locations
  Clone ID: uC-gsronu33B079d04b1.pep
LNNGWTHLNQLAGHTSFFSWLNNXRQARIDRPNKQARRMDGEXARCMEPLSTRGVGGTHRQTDTFASELASARFARLPSF

SEQ ID NO: 111475 - protein, 115 aa, Gossypium hirsutum
  Clone ID: uC-gsronu33B079d05b1.pep
SHCCKAMVSTFHLARLIMTSRSITQGSVACNSICRPSNSLLFLSPSSASAPPLLCLVRIPVNEQYSSLRAVRFGRTIRVVYSVSLHMVCRANIHSFIAVSRLGHLPLNESLQNIG

SEQ ID NO: 111476 - protein, 140 aa, Gossypium hirsutum
  Clone ID: uC-gsronu33B079e12b1.pep
MGKFFKNFFGLITKIKIGRGLLMLGGPVLGFSGCGALALPRLPFLFLGPQFFSFWAAYSHALAGLFLALPLGFPWGPPLFSRAGLSPFGPWPFSLTGTCASSLPRGAPPVGAFYPPRVGGIPPGGLVLFPEGFPPFFSGF

SEQ ID NO: 111477 - protein, 132 aa, Gossypium hirsutum
  Clone ID: uC-gsronu33B079f03b1.pep
PILSALPFPLLPIGAPFHGPSPPSPLLSVGRFMILFFASERNKPPFVWRAPQPGEKPKVARQAEGGPQGGDPCAPPPQAPLLARGGKTPRVGPPPPYPPPGGPPPQQGRPQRKAFQQKTKHLRGPKNKRGPP

SEQ ID NO: 111478 - protein, 111 aa, Gossypium hirsutum
  unsure (1)..(111): unsure at all Xaa locations
  Clone ID: uC-gsronu33B079f04b1.pep
EAPQTLNNTRRSKPENETDRSPGPRNIRYNETIKEAAERESAGAEARAEXQAQTAREGIXTQGGPKTPPKTGRRDGRRSRAQAAEEDPPDHXETNTGRPDRKAATGNDHPG

SEQ ID NO: 111479 - protein, 69 aa, Gossypium hirsutum
  Clone ID: uC-gsronu33B079f05b1.pep
NTRSESLLYTNLKNMCSAENDESSSMKNIRCYSYQKSYYGIVLFTALINGYQKKILVSTEELACLFEAL

SEQ ID NO: 111480 - protein, 45 aa, Gossypium hirsutum
  Clone ID: uC-gsronu33B079f08b1.pep
LTGQWKISIFPYKMTYPFQKRQSFSGKELSIDNFIFYIKINLNQV

SEQ ID NO: 111481 - protein, 111 aa, Gossypium hirsutum
  Clone ID: uC-gsronu33B079f11b1.pep
GCVAPPGGPPLGRRPGAGPVGHSGGGPRGKGARRGPLGFFRGLPVRACVTRGTALCSSRASTDTSVGACGRWVALGLHYGRPFGSLGLGPIIFFLNFSPSFFFFFFFFFIF

SEQ ID NO: 111482 - protein, 146 aa, Gossypium hirsutum
  Clone ID: uC-gsronu33B079g06b1.pep
PTFSPTRPAKRPSNKMKGTLGKHFQVQFHHHQSSSATSSSIFTRNLLDFGSQDDPSTSVPDLDAADDKDFILSQDFFCTPDYITPDNQNLMNGFDCNKENIPCPKSPEKPNTLKSKRPRQDGILVNPLSPTLSGSQQIVELASDNF

SEQ ID NO: 111483 - protein, 46 aa, Gossypium hirsutum
  Clone ID: uC-gsronu33B079g10b1.pep
MQSKHKLTEPNPLKQMQLWRQSRFSHFDALQTSLHYIHPQIRIIKN

SEQ ID NO: 111484 - protein, 62 aa, Gossypium hirsutum
  unsure (1)..(62): unsure at all Xaa locations
  Clone ID: uC-gsronu33B080a06b1.pep
NHLLSLNGFEICKQRWFAFYPEEISFVFFLLEKKNEHSNAESLAXKELQKKKKNKIKKETPP

SEQ ID NO: 111485 - protein, 75 aa, Gossypium hirsutum
  unsure (1)..(75): unsure at all Xaa locations
  Clone ID: uC-gsronu33B080a07b1.pep
RLLXALECLYNFLWVLNTCPWLISANPHLNNFLARLDSFYSNDISKVIYTQNQASHASVLNATTQNPRWSTPPTP

SEQ ID NO: 111486 - protein, 60 aa, Gossypium hirsutum
  Clone ID: uC-gsronu33B080a09b1.pep
HASGSRSRAAPCRCFLERCARHPSASPPLRAHRRPSETRGCCGYLGSPRRDKEGLAGAHV

SEQ ID NO: 111487 - protein, 52 aa, Gossypium hirsutum
  Clone ID: uC-gsronu33B080b02b1.pep
MRRLKKHKMISSTRLIRASITGTLLEGSEMSNTSVSVYKTATPYSFCPCFNS

SEQ ID NO: 111488 - protein, 48 aa, Gossypium hirsutum
  unsure (1)..(48): unsure at all Xaa locations
  Clone ID: uC-gsronu33B080b04b1.pep
CFLGSDMFLDAIKNTDQFLLLRXVWCSTYMFKYVTXXAFFFSIECESG

SEQ ID NO: 111489 - protein, 62 aa, Gossypium hirsutum
  Clone ID: uC-gsronu33B080b07b1.pep
AICSNKERVQVMPVIASDRESLIVLGLGGEYVGMFSSNLWDFRTCVYGDFSCGCCPQCGSSW

SEQ ID NO: 111490 - protein, 67 aa, Gossypium hirsutum
  Clone ID: uC-gsronu33B080b10b1.pep
WCNKIFMLKFSKKKKKKKKKKKKKKKKKKNKKAGNITNAKAAITRLQDGLSDISAPNYKYRVEAYKP

SEQ ID NO: 111491 - protein, 96 aa, Gossypium hirsutum
  unsure (1)..(96): unsure at all Xaa locations
  Clone ID: uC-gsronu33B080c07b1.pep
PRCRPRVRPRVXGLIDRRFAQNPQIVETLRENNLKWILNHINHEKEIMETNRHQALVKPPRSTQSVRSWIEMHSGDQSLLGEHSWEMVLTYMKGVT

SEQ ID NO: 111492 - protein, 65 aa, Gossypium hirsutum
  Clone ID: uC-gsronu33B080c11b1.pep
LLPPTRPGNMKGNCYGTCSDYPDDPLTYFKSALKLRLGIKTIVRFGRQTSWTVKQDAEYVLHVLK

SEQ ID NO: 111493 - protein, 95 aa, Gossypium hirsutum
  unsure (1)..(95): unsure at all Xaa locations
  Clone ID: uC-gsronu33B080d10b1.pep
TDKGELSWQCLTPXKKKKKKKKKKKKKKKKKKNKTKKKIKKKNKKKKKKKKKKNKRGGRFKEKKFTNRGKQRKSFFMGPQKRNTWPLKKNGVTGK

SEQ ID NO: 111494 - protein, 82 aa, Gossypium hirsutum
  Clone ID: uC-gsronu33B080e02b1.pep
KTLVLIHPANDDPHQTSSSADKTLDLELGAAHRQTCLICMITIAALGISLYGVELYPGSNLKIMVTILRQTSQLMLQIRCRL

SEQ ID NO: 111495 - protein, 71 aa, Gossypium hirsutum
  Clone ID: uC-gsronu33B080e06b1.pep
FGFWRFAEQGMRFLSLIPRIGVQLGGLCLTLVWVFPGNPSLPLPPPFPFYLPSLQQLDFGEKKRGKNHKKL

SEQ ID NO: 111496 - protein, 68 aa, Gossypium hirsutum
  Clone ID: uC-gsronu33B080e08b1.pep
SLFLVLFFLFIMVGYIWLVLLCFCACEACWCNVGIAGCFDEDHFSVNFLLFYQTTCIAALFFMNNLSS

SEQ ID NO: 111497 - protein, 23 aa, Gossypium hirsutum
  Clone ID: uC-gsronu33B080f05b1.pep
GLQGRFFRKNNLSHCINHQYKTS

SEQ ID NO: 111498 - protein, 136 aa, Gossypium hirsutum
  Clone ID: uC-gsronu33B081a02b1.pep
RNALKRAPLLIPIFSHCYIPCNPSLAGNPIFFIDETRIFCCGFDISSFFDRESFFRTSESDPESLKKQRSVSEKLAGSSTDVSRRSMDAGFLTGTRTPRWVEFWSDAAVDRRRRNSSSSPSDSSPETYFDLPRTGI

SEQ ID NO: 111499 - protein, 142 aa, Gossypium hirsutum
  unsure (1)..(142): unsure at all Xaa locations
  Clone ID: uC-gsronu33B081b04b1.pep
MQMFATTLTDKTNTLEDRSYDSSDNVXARIHVKDGLPPDQQRLIFGGXQLDYCRTLAEYNNQKESTLHLALRMRRGMQIFAKTLTGQTITPEVESSDTIDNVKAKIQDKEGIPPDQQRLIFAGKHFEDGRTLADYNIQKEST

SEQ ID NO: 111500 - protein, 115 aa, Gossypium hirsutum
  Clone ID: uC-gsronu33B081b07b1.pep
HFVVKKVKLGDRITALQQIVSPFGKTDTASVLLEAIGYINFLQEQVQLLSNPYMKPNSHKDPWGSLDIKEQKGDIKVDLRSRGLCLVPISCTPKVYHENTASDYWSPTYRGCLYR

SEQ ID NO: 111501 - protein, 58 aa, Gossypium hirsutum
  Clone ID: uC-gsronu33B081b08b1.pep
PRKNKWKNHHKDPHHAFPPKSLIPRLWKFNLIITLPLKLRNPDLKKTTFLSFFLLCWL

SEQ ID NO: 111502 - protein, 34 aa, Gossypium hirsutum
  Clone ID: uC-gsronu33B081b09b1.pep
TDLGEGVSLSSILSPVDLGIISTLTLPKTDRTNG

SEQ ID NO: 111503 - protein, 34 aa, Gossypium hirsutum
  Clone ID: uC-gsronu33B081b11b1.pep
LIYETKFNYFSFTVPLTKGSKLPYIYHTRIARMA

SEQ ID NO: 111504 - protein, 68 aa, Gossypium hirsutum
  Clone ID: uC-gsronu33B081c05b1.pep
SISMLVLRSVTCDRFLDFLPIMSWMPRDLNGLLLVWKQTQDLGWCVHSYIPFLWPTQIYLGMWGHSLG

SEQ ID NO: 111505 - protein, 44 aa, Gossypium hirsutum
  Clone ID: uC-gsronu33B081c06b1.pep
PMETQSDPQPTDLVGEVSLSSTLSPVEHEIASWLALPTMDPKSG

SEQ ID NO: 111506 - protein, 73 aa, Gossypium hirsutum
  Clone ID: uC-gsronu33B081c07b1.pep
FNSTKNSLPHYSWQASCQHKFPAFPHSHDYATEMSLISDLRMPTLGYLSEIAVAQFRSYGHKQTIEGESRYLS

SEQ ID NO: 111507 - protein, 87 aa, Gossypium hirsutum
  unsure (1)..(87): unsure at all Xaa locations
  Clone ID: uC-gsronu33B081c08b1.pep
HHFICVFVGTVSGMAFNKLTDIGSSTPAGLVADALAHGFSLFLAVFVGTYIXCVHVNPGATLGASVGGNITILRGILNWIALLFGLS

SEQ ID NO: 111508 - protein, 25 aa, Gossypium hirsutum
  Clone ID: uC-gsronu33B081c09b1.pep
DTVYLQHPTDLRDEVELSLILSPLD

SEQ ID NO: 111509 - protein, 30 aa, Gossypium hirsutum
  Clone ID: uC-gsronu33B081c10b1.pep
EKVELSLILSPLDQAIKSTLTFPHTYRTND

SEQ ID NO: 111510 - protein, 62 aa, Gossypium hirsutum
  Clone ID: uC-gsronu33B081c11b1.pep
LLSPRDCECEKELLYLVNQWAVEEELFLCTDNCDGLWMNSRGPFRFEMIHAERGKMPEGLKF

SEQ ID NO: 111511 - protein, 165 aa, Gossypium hirsutum
  Clone ID: uC-gsronu33B081d02b1.pep
MVELDWKAKMVSSDIPKKSPKLSNKLQVSIPTPFRFSNMSSPLSTSPSASKAYDYYLRLPELRKLWETQEFPAWKNEVVLKPALHALEITFRFISIVLSDPRPYLNRREWTRRLQSLTTSQIELIAMLCEEENEAPILDLTSSNGVLTRESSSAEVWKIHGERPW

SEQ ID NO: 111512 - protein, 52 aa, Gossypium hirsutum
  Clone ID: uC-gsronu33B081d05b1.pep
MWGHVMKVAWHQEKTLGGQGSIPELGSSKIELAFLMVFYSELVVILVPENFI

SEQ ID NO: 111513 - protein, 46 aa, Gossypium hirsutum
  Clone ID: uC-gsronu33B081d07b1.pep
LAPIDTLREGHVTALPEEVGLSFIPTPLAQAISARILWPPSDRTRE

SEQ ID NO: 111514 - protein, 31 aa, Gossypium hirsutum
  Clone ID: uC-gsronu33B081d08b1.pep
NSNSIYEPYLRWNMDECVGSFNLNCIRRFWN

SEQ ID NO: 111515 - protein, 27 aa, Gossypium hirsutum
  Clone ID: uC-gsronu33B081d09b1.pep
ITHRYRFSSTSNSSIRKNLTFSHSQSF

SEQ ID NO: 111516 - protein, 31 aa, Gossypium hirsutum
  Clone ID: uC-gsronu33B081d11b1.pep
VWGKVREAMIPWSKGLRVLERATSSHKSVGC

SEQ ID NO: 111517 - protein, 56 aa, Gossypium hirsutum
  Clone ID: uC-gsronu33B081d12b1.pep
DYYHRIRKIHDASFAYIAIRLSLGPLSIRLSAQHSTDMDDGSSRCDRPYVPIACPH

SEQ ID NO: 111518 - protein, 21 aa, Gossypium hirsutum
  Clone ID: uC-gsronu33B081e08b1.pep
NRTIYYSKYFGLRDKFYTSFT

SEQ ID NO: 111519 - protein, 36 aa, Gossypium hirsutum
  Clone ID: uC-gsronu33B081e11b1.pep
LFVRLVWGNFRVALISWSRALGERTRKTLSHKSVVC

SEQ ID NO: 111520 - protein, 68 aa, Gossypium hirsutum
  Clone ID: uC-gsronu33B081e12b1.pep
PMRPISVREFYGHVEGLVTVIENEDYAHFLSTISGILYTNVDYTDYWGHAYRYIWSIAQLELTSISVE

SEQ ID NO: 111521 - protein, 37 aa, Gossypium hirsutum
  Clone ID: uC-gsronu33B081f10b1.pep
SFGHRHIMRELDLIYIKIDCTLKDKQYFRDLIATEYR

SEQ ID NO: 111522 - protein, 98 aa, Gossypium hirsutum
  Clone ID: uC-gsronu33B081g10b1.pep
AQTPIAHYLKYSSNPSTIRPSRRSLRASSRITGPARLGASLLSTRAVLFMNTCKNGPYAEPAESWPSPSQSEPWRKGGAGAQRVEGTLKYSYRKRKNK

SEQ ID NO: 111523 - protein, 59 aa, Gossypium hirsutum
  Clone ID: uC-gsronu33B081h02b1.pep
HLINEMSRFGAAELHADAAIIGGTASQEVIKLMTKQVVPMTGTSAFNAIDHKSQLLNLC

SEQ ID NO: 111524 - protein, 88 aa, Gossypium hirsutum
  Clone ID: uC-gsronu33B081h08b1.pep
MDRTREARRVSMATAAATNGLSRRRHRTSSLRDSPEEDGPVETHETARLRDRKKDGIGSDVKKMVAEVNNEPESAGDTAKTEAHSGSS

SEQ ID NO: 111525 - protein, 53 aa, Gossypium hirsutum
  Clone ID: uC-gsronu33B081h09b1.pep
LASVRNNNKLRELIILRKSILLLKILTNPHLTTNHFLGNQATSGCYSNTSMYP

SEQ ID NO: 111526 - protein, 65 aa, Gossypium hirsutum
  Clone ID: uC-gsronu33B081h12b1.pep
RLRRACALLVFLHRVILSFKRPFHLKTCTSPSIGPSGNSFCISSSQSKFVLILLGLLPPMKRVSL

SEQ ID NO: 111527 - protein, 32 aa, Gossypium hirsutum
  Clone ID: uC-gsronu33B082a04b1.pep
PFSYERAVAWKVLNEEENAHCICFMFVNWSFV

SEQ ID NO: 111528 - protein, 83 aa, Gossypium hirsutum
  Clone ID: uC-gsronu33B082a10b1.pep
SKYSISLNSVSKRHHLGLKFWRKLHHCCLFDCKVVSYSACWSILSFNYTRNSWPCSASLFFIYSNTKSFLEIIAIYSFFFFTN

SEQ ID NO: 111529 - protein, 53 aa, Gossypium hirsutum
  Clone ID: uC-gsronu33B082b05b1.pep
NIRRIYNCLIRITLKDFLNDKTKSIFGYVPLTYKTVSTTYGTTSSGENLMRTC

SEQ ID NO: 111530 - protein, 48 aa, Gossypium hirsutum
  Clone ID: uC-gsronu33B082b06b1.pep
MGWGSKAGDWAFKGLTAGLGLATIYLTATFSVNVYRGLAWHNSHSKIE

SEQ ID NO: 111531 - protein, 135 aa, Gossypium hirsutum
  Clone ID: uC-gsronu33B082b08b1.pep
LWNSTSETVTLSGKKVWQGSHDADFPETIEDGDVGEFTHDAVTEQNDVPGSMVGLVYKLHDGTRWIVAWSNPQGEDSKVYTNIHKEPIRWEQIKTDLDTRGSSKSKVRKFGYVASMEIDPKKRSPTLKASFESEA

SEQ ID NO: 111532 - protein, 155 aa, Gossypium hirsutum
  unsure (1)..(155): unsure at all Xaa locations
  Clone ID: uC-gsronu33B082c03b1.pep
LAFAHASDFGESLWSQVLQVQENLGFNTLYDGSDSLNMHWSEIRRCIPGSIGSDFSAIGNIGRGSLVSPDISRNNVGFGESFRFRKVLQGQEIFVSPPYRNGSTADENEENDAFGLPDVGQLSGTRSGWSXLMHRYNTHHHYLNPFLIRFFLERT

SEQ ID NO: 111533 - protein, 77 aa, Gossypium hirsutum
  Clone ID: uC-gsronu33B082c05b1.pep
TKIDIYYAGRVFYSHHLSTTHHHIESLRNQYQTYGDPWLGELPFFYELQLMTRSRCTAFICPCAARPPSRWARTPRS

SEQ ID NO: 111534 - protein, 123 aa, Gossypium hirsutum
  Clone ID: uC-gsronu33B082d01b1.pep
YIDAIFFCGAPFFGAPVFLPLACVFILFFWGPLFFFHWRGFYTVWSVKPLGFPIFFPLGQSPFSHVVFFWNGPPPLAFPIFCAPLLVFGPPLFWVFYARGVGGFPPVYSFLWPGPLAPLFAFF

SEQ ID NO: 111535 - protein, 41 aa, Gossypium hirsutum
  Clone ID: uC-gsronu33B082d07b1.pep
PTTIGALIAGQLPHCWLPCAAVDLTPRGSGPIFQVMAPTRP

SEQ ID NO: 111536 - protein, 31 aa, Gossypium hirsutum
  Clone ID: uC-gsronu33B082e02b1.pep
ANYHPKSNIISHYLHSQSYPTNQMNSIEQSS

SEQ ID NO: 111537 - protein, 58 aa, Gossypium hirsutum
  Clone ID: uC-gsronu33B082f02b1.pep
IIKTPFPFSLFHKPKESHSGTVEEEAVSATACGIDVEAEVSDLASKDNWFPLLTHRIS

SEQ ID NO: 111538 - protein, 38 aa, Gossypium hirsutum
  Clone ID: uC-gsronu33B082g08b1.pep
IVVLEVLISCAWIQAYMFCYSEGYGGAVIKKTHPSRVR

SEQ ID NO: 111539 - protein, 63 aa, Gossypium hirsutum
  Clone ID: uC-gsronu33B082g09b1.pep
SIYLIAFLTILCQAIDLGKTYEMGNTRTNISSRSNGQIMQIMSQFPRKEKMLPSNLCIYAMFC

SEQ ID NO: 111540 - protein, 108 aa, Gossypium hirsutum
  Clone ID: uC-gsronu33B082g11b1.pep
SWGYHIMVVGGRLHCLWWCKNWRLRLRLFLLARFNTLVDGLQASLAMKGYFERTQATVSSFFSWLEIAILRILFVAVAFPGVVSWVVIKPGLHLLTILAVRGALPDVR

SEQ ID NO: 111541 - protein, 74 aa, Gossypium hirsutum
  Clone ID: uC-gsronu33B082h07b1.pep
DFISVFFSSKLKFNRHFFVTFPSDLGFWFSGLPFCLWVLKMAHLMQCRDRSSFSSAICCLGFFFFALFSFLFSF

SEQ ID NO: 111542 - protein, 51 aa, Gossypium hirsutum
  Clone ID: uC-gsronu33B086a03b1.pep
PRVRRIATYERDGKLKSLLKKTYLRRWVGALDTGGNEAEALPNSMDFVRYQ

SEQ ID NO: 111543 - protein, 44 aa, Gossypium hirsutum
  Clone ID: uC-gsronu33B086b08b1.pep
NGPPLFFFFFFFFFFFFFFFFFFFFFFFFFFFFFFFFFFFKVNR

SEQ ID NO: 111544 - protein, 35 aa, Gossypium hirsutum
  Clone ID: uC-gsronu33B086c08b1.pep
INTCMNDQKDKLWPMLQKLGVTMKADEKDLMGKPL

SEQ ID NO: 111545 - protein, 42 aa, Gossypium hirsutum
  Clone ID: uC-gsronu33B086e02b1.pep
SWCGFYQSIRPTQMGLSLNIDMSSTAGIEPLPVIDFVTQLLN

SEQ ID NO: 111546 - protein, 25 aa, Gossypium hirsutum
  Clone ID: uC-gsronu33B086e11b1.pep
NHFSLITFNNWNLKKKSQCTSVLLA

SEQ ID NO: 111547 - protein, 109 aa, Gossypium hirsutum
  Clone ID: uC-gsronu33B086g05b1.pep
MGIHLNTIPQSTITKSHYHTHKIFLFCNYILLSAASSCIFLTLALRLCPSLSGFFLILLHIITIAGAISGCAAASSGTNGWYATHMVATVLTAIFQGSCSVLIFTKTSD

SEQ ID NO: 111548 - protein, 85 aa, Gossypium hirsutum
  Clone ID: uC-gsronu33B087a03b1.pep
IVCASSCSLQLELTKKYLNMVILVDNIKDALEIRILADIVFSHLPPPFSFFKCLVGMMGPVSVFLHQFLIKFGTKLCIIGLALKI

SEQ ID NO: 111549 - protein, 49 aa, Gossypium hirsutum
  unsure (1)..(49): unsure at all Xaa locations
  Clone ID: uC-gsronu33B087a04b1.pep
CFGEYGVHVADSSSSNTGXNGQTIGTCAYQCQILGRSCSITGPWNKSSM

SEQ ID NO: 111550 - protein, 80 aa, Gossypium hirsutum
  Clone ID: uC-gsronu33B087a07b1.pep
FVSPDNVLVAELKAKPLLIHQIREAQKVDDELVAKRAECVPNKESEFQIDDDDCLRTREHAKAHRLARYAKFDDWDHWNM

SEQ ID NO: 111551 - protein, 66 aa, Gossypium hirsutum
  Clone ID: uC-gsronu33B087a09b1.pep
VFFFPFSILNMLVNSSSCCRKRQSKLRHNVRVPRLNRLRRLRTKKMGAVGIKTDMEIKNLKLYMEN

SEQ ID NO: 111552 - protein, 52 aa, Gossypium hirsutum
  Clone ID: uC-gsronu33B087b02b1.pep
KVDIAKKMKKRKKPKNKEHTTMTACTTKTSSSSFSIAISTCMCPSTTIESEG

SEQ ID NO: 111553 - protein, 32 aa, Gossypium hirsutum
  Clone ID: uC-gsronu33B087c12b1.pep
LFILIFFFFYFFFFFFFLFFFFFFFFFFFFKL

SEQ ID NO: 111554 - protein, 43 aa, Gossypium hirsutum
  Clone ID: uC-gsronu33B087d04b1.pep
YSNLRPYYSFNALYCITITITNGYIFTFPPYLILYIAIYFKYI

SEQ ID NO: 111555 - protein, 47 aa, Gossypium hirsutum
  Clone ID: uC-gsronu33B087e04b1.pep
DNEGDSMLVGDVPWHMFVSTVKRLRALKSSELSALSLGSNKQGKLQA

SEQ ID NO: 111556 - protein, 52 aa, Gossypium hirsutum
  Clone ID: uC-gsronu33B087f05b1.pep
NLSLTEYSSVIVCIRNCLPFQMSYKYIPSEDVLIPVRISQFLTVWNLFEAAH

SEQ ID NO: 111557 - protein, 104 aa, Gossypium hirsutum
  Clone ID: uC-gsronu33B087f07b1.pep
MKDQKPKRMNGNYSEETPIPLRQRFSKPSSLPNNKRTLSVRSGQSSPIAKKKLASGIIHGVMQAMPQITIPRRSRLSLVSKSSVSSPSSMDKQKGIFIEGDITG

SEQ ID NO: 111558 - protein, 132 aa, Gossypium hirsutum
  Clone ID: uC-gsronu33B087f08b1.pep
METSKYFPSVETLDEGYQKTFKNCDELLPTLPQTKGWWFGQLFQYHGFWISGFCIRGSMLNHDHFKPRSTDIVVATSPKCGTTWLRALVFSIINRASFDFSDHPLRKANPQDLVPFFEKIIHKDGSTSFVDG

SEQ ID NO: 111559 - protein, 57 aa, Gossypium hirsutum
  Clone ID: uC-gsronu33B087f09b1.pep
QRKTNSTQTFPLVPYIDTSSCFYVVPTSRTIQLEVDGSKVLAHQLLLFQPHGPLQTP

SEQ ID NO: 111560 - protein, 35 aa, Gossypium hirsutum
  Clone ID: uC-gsronu33B087g02b1.pep
PRCLLLNLNIFIPLALQALITCGKNPPPGFICPPL

SEQ ID NO: 111561 - protein, 50 aa, Gossypium hirsutum
  Clone ID: uC-gsronu33B087g06b1.pep
LCYTILYSFKLTINDIIHLNIFGIWSLFLFESSHFCGILSLYSQEFVVNV

SEQ ID NO: 111562 - protein, 81 aa, Gossypium hirsutum
  Clone ID: uC-gsronu33B087h02b1.pep
KKMGDIKQNFHLRNRGAACSVPNVSFPYMQRHIFFFVAPNLISLAGPSHPQDWDTPPFPQLNGFEALPLFPGWVLGKKARP

SEQ ID NO: 111563 - protein, 39 aa, Gossypium hirsutum
  Clone ID: uC-gsronu33B087h07b1.pep
MGRQSCCYKQKLRKGLWSPEEDEKLLRHITKYGHGCWSS

SEQ ID NO: 111564 - protein, 41 aa, Gossypium hirsutum
  Clone ID: uC-gsronu33B089a11b1.pep
VLFFESKLIGLGMSLLSLPIKNHTFLYKAPLVSGCLGIHRQ

SEQ ID NO: 111565 - protein, 73 aa, Gossypium hirsutum
  Clone ID: uC-gsronu33B089a12b1.pep
AYIIGSMLSCSNSIPCTQNSHASSGHIIMSVLIFLRHIFNCILHMWLHNRCTNFNKLNKMLHKPISALLVQGH

SEQ ID NO: 111566 - protein, 34 aa, Gossypium hirsutum
  Clone ID: uC-gsronu33B089b09b1.pep
VTRHFVNYDGWLKINSLNPSSNCNNFRLLLLYAV

SEQ ID NO: 111567 - protein, 97 aa, Gossypium hirsutum
  Clone ID: uC-gsronu33B089b11b1.pep
MAGHRFDVTWTFSLVALFFLRAHWFYLPGVAPEDFKKGDPLLVKVNKLTSTKTQLPYSYYSLPFCRPEHIVDSAENLGEVLRGDRIENFPYVVKMRE

SEQ ID NO: 111568 - protein, 111 aa, Gossypium hirsutum
  unsure (1)..(111): unsure at all Xaa locations
  Clone ID: uC-gsronu33B089b12b1.pep
YSAGQSHHVSRVNSDKSTYQSGSDSKKEPAVPKDGPMANIAAQTFTFLELATVTKNFKPQCLLREGGLGRVYKGRFESTGQVVAVKQLDPKGLXGIHNFFVXVPMLSLLHH

SEQ ID NO: 111569 - protein, 133 aa, Gossypium hirsutum
  Clone ID: uC-gsronu33B089c03b1.pep
MAYHRFPWFVLPYLLITLSSMSSNIVLVGARHLLETSVPEIPKPELPEMSTFPKAELTKPELPEIPKPEIPKMPELPKPELPKVPELPKPELPEVSKFLKVPELPKPELPKVPEFPKVPELPNPELLRILEWK

SEQ ID NO: 111570 - protein, 101 aa, Gossypium hirsutum
  unsure (1)..(101): unsure at all Xaa locations
  Clone ID: uC-gsronu33B089d05b1.pep
DAQDGDRDWDETYPLYESRDSSYIEEGKRSTENGRTDRSYTKRRRQPKHXNLPKVDGKVKVEDERNKRLDTGGESNGRNQRESLLCKLATAGANKDPIYEV

SEQ ID NO: 111571 - protein, 60 aa, Gossypium hirsutum
  Clone ID: uC-gsronu33B089d12b1.pep
SGITKIVCHYIRLLSNTIKAAKFLPRSVVYTWSFVLVPNPSCSWPQFTREWTLSRPPIDP

SEQ ID NO: 111572 - protein, 74 aa, Gossypium hirsutum
  Clone ID: uC-gsronu33B089e12b1.pep
ASMICYQGERLISTTKPWKKYVHYNSDQKKSNGIDIHLYEHTISTDQRPKNWDHNRLHYRISYAAPSNKEYCDS

SEQ ID NO: 111573 - protein, 53 aa, Gossypium hirsutum
  Clone ID: uC-gsronu33B089f02b1.pep
NLIECEFSRQIWLHVLKLCLIHRKTMSWIQQLYWAVPRLKGKSSIKNTPPSWW

SEQ ID NO: 111574 - protein, 86 aa, Gossypium hirsutum
  Clone ID: uC-gsronu33B089f05b1.pep
NNSTMKSLSVSGGFLLTLGLTSGNWVITNAAPIREKPDMCEKAFPDCCCLKDNCDIRCVDIYGKSAFGYCSTLKEEDDVCVCRYHC

SEQ ID NO: 111575 - protein, 89 aa, Gossypium hirsutum
  unsure (1)..(89): unsure at all Xaa locations
  Clone ID: uC-gsronu33B089g01b1.pep
KQKVPYTFNSIVQSNTLQLVKIAETSSKDGLTIICSKRGGNLFLHGHSNWLQTVPAKPEGIMFNFVPITSLXLTGITGSGYLSHAINLY

SEQ ID NO: 111576 - protein, 186 aa, Gossypium hirsutum
  unsure (1)..(186): unsure at all Xaa locations
  Clone ID: uC-gsronu33B089g08b1.pep
HASAHASALLAVAENDSWEFLLSSFSQNPKPSPIIIIRFLKFDVMKRAMPWDDHDEANDSSSSDESSSSNPDSEAEDGPPNTKLKNSSQAKSRKQKSAALDFEALKRHGYNEXLSVLNVPPPKEKPDWSWSTGRESSEIREIKESFEDRQKTRAAILDAEELVNGQTSKGEQNXXFSQNEKRKREL

SEQ ID NO: 111577 - protein, 108 aa, Gossypium hirsutum
  unsure (1)..(108): unsure at all Xaa locations
  Clone ID: uC-gsronu33B089g11b1.pep
TSARRSDQATSAIDSSSSIDGYDASDCLRSNNSCSSLSFYFAYQIVHATRGFASESLTPKSDHRVITDVPTTVAAIKNPSSKIVYDEYNHELXPPGDPNKXALGYFVL

SEQ ID NO: 111578 - protein, 74 aa, Gossypium hirsutum
  Clone ID: uC-gsronu33B089h03b1.pep
RHLERQNPPSQGRVILPYRRGQPSPKVPPSPTPKPSRHPGHSLDALIVNIPPSTIHMLKRSIHNEWLHFDMIGD

SEQ ID NO: 111579 - protein, 95 aa, Gossypium hirsutum
  Clone ID: uC-gsronu33B089h04b1.pep
YKLTGDKIIDKSVYGTYNNKSSSSSKYKQTRALKINNESSCKIKGYHGYLATSYHTAIISGFSLISSYLESVASSRNTVKALLISLSSGLLPMSL

SEQ ID NO: 111580 - protein, 100 aa, Gossypium hirsutum
  unsure (1)..(100): unsure at all Xaa locations
  Clone ID: uC-gsronu33B089h10b1.pep
LLPRRKAIDAEARQFKGREILTWAIAVHGGAGVHPNLPXERQEEAXRLLTRYLDIGISGLRFNLPAIDILKLGLRELETNPLVNFRRGSFLTDKGTLEIE

SEQ ID NO: 111581 - protein, 126 aa, Gossypium hirsutum
  unsure (1)..(126): unsure at all Xaa locations
  Clone ID: uC-gsronu33B090a05b1.pep
MLASSENLANIETSTFRSLFDDPWISESFSRDTQTLTIALQKSISDSCTGSIASPVPEPAPKQYRTAGPPPTGKVSKRKPRASKKSRTTFIAADPANFRQMVQQVTGIGFGDXKMTTVSPILKPEP

SEQ ID NO: 111582 - protein, 41 aa, Gossypium hirsutum
  Clone ID: uC-gsronu33B090a11b1.pep
NPTKSTKDYTTMSTNNTTNRIKAKKKHSHVLSPRIFTNLAL

SEQ ID NO: 111583 - protein, 185 aa, Gossypium hirsutum
  unsure (1)..(185): unsure at all Xaa locations
  Clone ID: uC-gsronu33B090b04b1.pep
GEGNHYLRYRVMASCYRIHFPEHLKSHRSHDIVLLCVDCHEVAHAAAEKYKKQIAGEFGIPLYVRKVVDSTQAPIVSGSSESTNFADSGVSPLQLRTAAKALLRHGPEMPPSRRDELTQIVMRYYGGREISNEDLERALVVGMSPHERRRLEKKKGLSLKQSTRIPXCKEQESNDATRILSTTSD

SEQ ID NO: 111584 - protein, 86 aa, Gossypium hirsutum
  Clone ID: uC-gsronu33B090b05b1.pep
HSVVHAYGRIKDNSRYANHHWLTFSLYQWRIKKLTVLTSFASIHCKQKNTTTICVTYIIEYRVYLKENRCENQRIGTIWVPNLLTF

SEQ ID NO: 111585 - protein, 48 aa, Gossypium hirsutum
  Clone ID: uC-gsronu33B090c06b1.pep
RSFLWKRFSTCDKLMMTLRLIYTIPIIDSPTSAQILIHLPKDLPGTKI

SEQ ID NO: 111586 - protein, 185 aa, Gossypium hirsutum
  Clone ID: uC-gsronu33B090e07b1.pep
LRVRALSNGGFGREAAGLSGVIPEGLVPAWYWTDQFAMEVIYHNRVLSHECRTTEPDSAMAFYIPFYAGLAVGKYLWLGYSSKDRDRYCEMMLEWIKDQPYWNRSDGWDHFMTMGRITWDFRRSKNEDWGSSCIYMPGMRNITRLLIERNPWDYFDVVVPYPTGFHPRSDSDIVHWQNFVRNRRR

SEQ ID NO: 111587 - protein, 48 aa, Gossypium hirsutum
  Clone ID: uC-gsronu33B090f10b1.pep
MTEKVLIGYYNVLKISKRKSSWLTLVRATHEKHAHLCVYITYPYIIDL

SEQ ID NO: 111588 - protein, 72 aa, Gossypium hirsutum
  unsure (1)..(72): unsure at all Xaa locations
  Clone ID: uC-gsronu33B090g02b1.pep
STDPTKTDACYLFKHWCAIXLIMLGVINLIGMLLTLLAPESKGTSLDELTGENGDENDEKQIQMDPSRTVPV

SEQ ID NO: 111589 - protein, 73 aa, Gossypium hirsutum
  Clone ID: uC-gsronu33B090g07b1.pep
ICCTIQACLIHFVSWSYILTFLSCLPNKCRDSMQCAGRLISGISPCSSPHCIIRIAYHCLLLAILCSTRYFPV

SEQ ID NO: 111590 - protein, 147 aa, Gossypium hirsutum
  unsure (1)..(147): unsure at all Xaa locations
  Clone ID: uC-gsronu33B090g10b1.pep
MDDSIGSSGTTLHIRKTPKKSKSKKNNKPIKVVYISNPMKVEISASNFMALVQKLTGQDAAELPEDPTLFTDADESVVVSAEDGGDQRVPDAAKTTNTAAAADHARVVLQQQYPAITDDNINAQGXPFDIYDDDVFTPQMIENLLGN

SEQ ID NO: 111591 - protein, 55 aa, Gossypium hirsutum
  unsure (1)..(55): unsure at all Xaa locations
  Clone ID: uC-gsronu33B090h02b1.pep
GGFIKKLMRTIKIKXRSITFSIPNTTNIILPFHLKNHTFYDLVLLTQPISTIIIS

SEQ ID NO: 111592 - protein, 39 aa, Gossypium hirsutum
  Clone ID: uC-gsronu33B096d06b1.pep
LTCYTRLNAPFQSWDSLRRIERRIDAAPALVRTHIFPLY

SEQ ID NO: 111593 - protein, 65 aa, Gossypium hirsutum
  Clone ID: uC-gsronu33B096d08b1.pep
MTEEYCPHHQDGHQLVKRIAIAIVGLLIVCAIEVLLVWAFLHPFMPRFLFQDVTIFAFNLSTVPH

SEQ ID NO: 111594 - protein, 35 aa, Gossypium hirsutum
  Clone ID: uC-gsronu33B096f01b1.pep
ECVCRMCWGLFRVIVCARMRTRHFEHPPSNTCVWG

SEQ ID NO: 111595 - protein, 36 aa, Gossypium hirsutum
  Clone ID: uC-gsronu33B096f09b1.pep
GTTQMTRDMIEREAIYYETDSLCFLLEVIHVYLYPV

SEQ ID NO: 111596 - protein, 38 aa, Gossypium hirsutum
  Clone ID: uC-gsronu33B096g07b1.pep
IFVELTTWLPSSFGEKMLRFCWPNTPFLYLSQFFEVIK

SEQ ID NO: 111597 - protein, 83 aa, Gossypium hirsutum
  Clone ID: uC-gsronu33B096g12b1.pep
PMLLLSCAPLPVFPNLVKLKIHCSNDLRPYYDQWEKGLETLLSSLPELEKLEFNQEALISLPEKAPSCLLSKLKSIKISDFTD

SEQ ID NO: 111598 - protein, 36 aa, Gossypium hirsutum
  unsure (1)..(36): unsure at all Xaa locations
  Clone ID: uC-gsronu33B096h08b1.pep
ICRINCNRSXXWSVKVGVMPHCSSGENSLSKSCVTT

SEQ ID NO: 111599 - protein, 43 aa, Gossypium hirsutum
  Clone ID: uC-gsronu33B096h11b1.pep
AACHSWRMKLMVRKRLKDCCTIITPARLEHIDHEPHKAEPTKS

SEQ ID NO: 111600 - protein, 71 aa, Gossypium hirsutum
  Clone ID: uC-gsronu33B098a04b1.pep
PMGPKTLCNACGVRYISGRLFPEYRPAASPTFIPSVHSNSHKKVLEMRTKCGTADAPEMIPNKSNPALDYI

SEQ ID NO: 111601 - protein, 93 aa, Gossypium hirsutum
  unsure (1)..(93): unsure at all Xaa locations
  Clone ID: uC-gsronu33B098b05b1.pep
VTFFKKLSRPTGHRMYMLRTMVSQVVKHERIETTVAKAKEIQRLADNMVQVGKEGTLCAARHAAAFVPGDDVIHKLXTELAYRYKDRAGGYTR

SEQ ID NO: 111602 - protein, 49 aa, Gossypium hirsutum
  Clone ID: uC-gsronu33B098b06b1.pep
FSEDSTFVIIPLNNVVSLRFKFEFFLRVQCILQLQSLLLYKSCLSTSYF

SEQ ID NO: 111603 - protein, 58 aa, Gossypium hirsutum
  unsure (1)..(58): unsure at all Xaa locations
  Clone ID: uC-gsronu33B098c04b1.pep
WCFYRARVGXLVGTLLQVYITGLTVMGAAKASTKCSTGGIQGIAWAFGGMIFALVYCT

SEQ ID NO: 111604 - protein, 91 aa, Gossypium hirsutum
  Clone ID: uC-gsronu33B098c07b1.pep
VHRSCPNLCPQGCIYLSCPTRPCVTPCVRLCNSLTCLQNNSQMAHDRVNRPCGSQRTCFMLCEPKIYLKSSHFTRKFTLNKSNHSNIHLRD

SEQ ID NO: 111605 - protein, 70 aa, Gossypium hirsutum
  Clone ID: uC-gsronu33B098d05b1.pep
QRATNTVHHLLMQAMVARCHQRGLPVHPRSKEMTPTNTQSSVFQMLFLVVLETHIHFKNHSRRYHRYRVV

SEQ ID NO: 111606 - protein, 182 aa, Gossypium hirsutum
  Clone ID: uC-gsronu33B098e05b1.pep
SLSIKDDEIDIGVGALRPDLTSFMNEWRTIFSRFHLIIVKDPDLKEELKIPEGFNLDVYKKPDIDRVVGTSTSTIFSGYSCRYFGYLVSRKKYIISGDDDCYPAKDNKGILVDAGAQHITNLTTPGTPFFFNTLYDPFTECADFVRGYPFSLRSGVQCALAWGLWLKLTDYECTYLSPQARE

SEQ ID NO: 111607 - protein, 56 aa, Gossypium hirsutum
  Clone ID: uC-gsronu33B098e08b1.pep
LFYFINLKFIIHFSHTNSIHNLIHTFFLVLFNSAKTNNLIFKISFQLFTLLTKLGL

SEQ ID NO: 111608 - protein, 120 aa, Gossypium hirsutum
  Clone ID: uC-gsronu33B098e09b1.pep
MLTCIARSKQAGDDSLAQPEEIDSSNNPNTKHNQAMKSLTSQLKDMALKASGAYKHCNPCTAQTRLKNPGGSDADSDRYKWSYRRTGSSNSATQGLVERRWQPGLQYILSKLTTTPLFIC

SEQ ID NO: 111609 - protein, 110 aa, Gossypium hirsutum
  Clone ID: uC-gsronu33B098h10b1.pep
MKKIGGFKLRRKLVTVFKWIFRPRKSNRFSSFLTRPIRTRNPLSRLCSFLRRGRIKGISNSDPGYIQLGEQEVKRVEVPKGHLAVYVGESESDTRRVVAPVIYFNHPLVG

SEQ ID NO: 111610 - protein, 80 aa, Gossypium hirsutum
  Clone ID: uC-gsronu33B098h11b1.pep
VIQLLGLAPFVPHSIVLFIGFGLTRRDLEGRPGTDNSGRNRVDRSRSGGAGEGDLRGRDRNDIARAEYKSHPGVARAGYL

SEQ ID NO: 111611 - protein, 62 aa, Gossypium hirsutum
  Clone ID: uC-gsronu33B099a12b1.pep
FCSFYMDGPFYFLVRGSFFFFFFFFFFFFFFLSQCPFTSYLTQNIYIQSSPDTFFKTQLHKT

SEQ ID NO: 111612 - protein, 53 aa, Gossypium hirsutum
  Clone ID: uC-gsronu33B099b12b1.pep
YFCHHRESNPGLPPTLTRHPYSSLVASLSHFTRGSFCVTFYPQILIRPPIQSP

SEQ ID NO: 111613 - protein, 54 aa, Gossypium hirsutum
  Clone ID: uC-gsronu33B099c11b1.pep
HSFFDDSIVDWARPLLSQALEHGNFDAFVDSRLQKDYDSDEMTRMVARAAACVR

SEQ ID NO: 111614 - protein, 143 aa, Gossypium hirsutum
  Clone ID: uC-gsronu33B099d01b1.pep
LVLFIAYIPSHVLKSQQVLDISKMRFSLVVLFAASLASAASVFKRWNDDYGVPSCAKPCIANVDPWPCKHDDKACLCANSDYHALLGECIQGACSPEDAKKAVESGKKYCKAAGVDHEKPIPKCGVHCLEKAPVGKCKHDDYK

SEQ ID NO: 111615 - protein, 116 aa, Gossypium hirsutum
  Clone ID: uC-gsronu33B099e08b1.pep
KKEPKEEAPKKGTPRKKETAQAKSKKTDHRGGPQPPEEKHRKKKEGSPPGPPQKRPPHKGARFPNQKRRWSPKGKREPATEKKTPPAKKAKPPKKKKNRAPQGPPERGGTKRRPPR

SEQ ID NO: 111616 - protein, 46 aa, Gossypium hirsutum
  Clone ID: uC-gsronu33B099g04b1.pep
VSNKFYFTFTVRPEAMKEGLKIRNVVPATEEEARRVLERMDAERSQ

SEQ ID NO: 111617 - protein, 95 aa, Gossypium hirsutum
  Clone ID: uC-gsronu33B099g06b1.pep
HVSSHASDYILSHFAMASHGNITVISTSPKGSEAEVAPNSGKGGQCLCSPTTHQGSFRCRFHRSKSSAWMMKRSKSMPANNSPTASFSPKSVEST

SEQ ID NO: 111618 - protein, 76 aa, Gossypium hirsutum
  Clone ID: uC-gsronu33B100a05b1.pep
IKKTSPTRIEVRKLAFFTQFSTSFKFKKVLEFKAFTNFFAVKTTIKTQSITFPSQNPRQNSAFKSLGRELNQTKTH

SEQ ID NO: 111619 - protein, 38 aa, Gossypium hirsutum
  Clone ID: uC-gsronu33B100b06b1.pep
HWGFLAAPSTGENRAAGFPVLSLILGQLIPRDVSGRVG

SEQ ID NO: 111620 - protein, 41 aa, Gossypium hirsutum
  Clone ID: uC-gsronu33B100b12b1.pep
RNFMLPPHEILARRLARNQISSFSVFEGVGRKLKGRDSKKV

SEQ ID NO: 111621 - protein, 115 aa, Gossypium hirsutum
  Clone ID: uC-gsronu33B100c01b1.pep
IVSGFSGFIHERPAVRIHASRPVNSNSLAFFVTVLLLFMILNSHQMSPNFLLWLVVGIFLMATSLRMYATCQQLQAQARAHAAAASGLLGHTELRLLMPPLIVFATRGRLLGLLS

SEQ ID NO: 111622 - protein, 39 aa, Gossypium hirsutum
  Clone ID: uC-gsronu33B100d02b1.pep
THASVVMLTINEFDYLLLDQADSILYCFKMHNMTKCLTR

SEQ ID NO: 111623 - protein, 34 aa, Gossypium hirsutum
  Clone ID: uC-gsronu33B100d10b1.pep
SRDTIIKQDRVSLFCQLEHPDIIFGNKVFPTSPR

SEQ ID NO: 111624 - protein, 36 aa, Gossypium hirsutum
  Clone ID: uC-gsronu33B100e04b1.pep
NEISTQDPAQAVKRKPTQLETKNFPFLLKFLEGFIF

SEQ ID NO: 111625 - protein, 74 aa, Gossypium hirsutum
  Clone ID: uC-gsronu33B100f09b1.pep
PRFPTLYYKLLIRLIRHLKRAAIRSQTRCPCLLRSLRHISLLHVFRCFPFLQVLKNLSLTFSRFDFLFCRTHGR

SEQ ID NO: 111626 - protein, 60 aa, Gossypium hirsutum
  Clone ID: uC-gsronu33B100g03b1.pep
SHASVTDDKVLRKIIVRHVFFFHCVVVFQFLRFLWKKNSGFRGKEEKGEKMETRENVRVG

SEQ ID NO: 111627 - protein, 54 aa, Gossypium hirsutum
  Clone ID: uC-gsronu33B100g05b1.pep
MAPNITTTKAATITAKAPERAYVTFLAGNGDYVKGVVGLAKGLRKVNSKYPLVV

SEQ ID NO: 111628 - protein, 63 aa, Gossypium hirsutum
  Clone ID: uC-gsronu33B100g10b1.pep
DGKGRNPILAPSILDREGTACSGKPGESRETKRWLWRIDEEVESGLSDFDCPMNSRFCHRLWL

SEQ ID NO: 111629 - protein, 39 aa, Gossypium hirsutum
  Clone ID: uC-gsronu33B101a09b1.pep
SSRVRLILRNSGFLYDQRQLSPRYPNSTLTEPPKYSASS

SEQ ID NO: 111630 - protein, 37 aa, Gossypium hirsutum
  Clone ID: uC-gsronu33B101b04b1.pep
GSEIMGYRKFLESKKVIDKGLEIKSKQHYKLRKPCDV

SEQ ID NO: 111631 - protein, 39 aa, Gossypium hirsutum
  Clone ID: uC-gsronu33B101e05b1.pep
SLCRIMVSLFVMRTLLEGVISVSFRVYTFRYLHVPTVVS

SEQ ID NO: 111632 - protein, 42 aa, Gossypium hirsutum
  Clone ID: uC-gsronu33B101f11b1.pep
RIDENQDVLMNGWKHLYIRKFYLTGLYALRHDEIIDYGHAKK

SEQ ID NO: 111633 - protein, 28 aa, Gossypium hirsutum
  Clone ID: uC-gsronu33B101g05b1.pep
IVIDNLNIDCNVILRSLFTNSILLVTNV

SEQ ID NO: 111634 - protein, 104 aa, Gossypium hirsutum
  Clone ID: uC-gsronu33B101h08b1.pep
VDAWVGIGGIRVPISEDIFQLTELGYGGVVMDTGTAVTRFPTIAYNTFRDAFIEQTANLPRVSGVSIFDTCYNLSSFVTDRIPSVSFYLTFVPILTLPVTILFF

SEQ ID NO: 111635 - protein, 75 aa, Gossypium hirsutum
  Clone ID: uC-gsronu33B101h10b1.pep
REIKKKKKKIGKQTPHYPLLYVDVTRIFEMIQSTLMNIKLTTKKRSSGFRAECSSNHITYSWSIDSRTRGRTRGR

SEQ ID NO: 111636 - protein, 141 aa, Gossypium hirsutum
  unsure (1)..(141): unsure at all Xaa locations
  Clone ID: uC-gsronu33B103e06b1.pep
TSSCLNPLRVNPTAHKDSDLSGPIFLYLSLCLFQLLAGKIQFGVILGWIVVSSIFLYVVFNMLAGRNGNLDLHTCTSVVGYCMLPVVIFSAASLFIPQGTSVARHAVAGIFVAWATRACTNLMVALADGGEEHXRGLISYA

SEQ ID NO: 111637 - protein, 77 aa, Gossypium hirsutum
  Clone ID: uC-gsronu33B103g01b1.pep
DVFYASSNPREAFFNYRDLDVGSNESGETDFEVAKEYGAEYFRNNFMRLAGVKAKIDPENFFKNEQSIPPLSTPPSD

SEQ ID NO: 111638 - protein, 52 aa, Gossypium hirsutum
  Clone ID: uC-gsronu33B103g03b1.pep
KKNMYNSYTIHQTQSTHSRTLSFFFFFFLISKSPFLCPTIPNDPSRLNFSSL

SEQ ID NO: 111639 - protein, 80 aa, Gossypium hirsutum
  Clone ID: uC-gsronu33B103g06b1.pep
CIKTFLVAYYCKKKTKNKSTKSRENRKNYQWKSWKHICMHETTLIFLWPYLFIYTSCCLIKMYLLSFILVYKIKGKLITF

SEQ ID NO: 111640 - protein, 71 aa, Gossypium hirsutum
  Clone ID: uC-gsronu33B103h06b1.pep
FRCPKKKIKSSKPPEVNLGPLKRPPPLFFFFFFFFFFFFFFFFFFFFFFFFFFFFFFFFFFFFFFFFFERV

SEQ ID NO: 111641 - protein, 45 aa, Gossypium hirsutum
  Clone ID: uC-gsronu33B103h11b1.pep
RISGGPLNEGQVHIADREDNNTSFRYNLRVGERHTFVFDFFVPRI

SEQ ID NO: 111642 - protein, 71 aa, Gossypium hirsutum
  Clone ID: uC-gsronu33B104a04b1.pep
TLKVKLKYLIGQKKTLSTNMNHEAKFKYKNVYLLIIVHYHLIETDAKFKERNYKITKTQYGTNIRIKIVLI

SEQ ID NO: 111643 - protein, 137 aa, Gossypium hirsutum
  unsure (1)..(137): unsure at all Xaa locations
  Clone ID: uC-gsronu33B104a10b1.pep
KKKQRRKNREHNKKRRDKTQERGPGPRQEKRTHRGKKTPPQGVNPRHKGGPKXKKSEQKGQRQKEPTSKKRMQPKKRKSVPKRINPGTPGVYPGQRRKTTATKKKLRDPKKKVRNRKPPKGNPDPLKRPPPYLNIFF

SEQ ID NO: 111644 - protein, 59 aa, Gossypium hirsutum
  Clone ID: uC-gsronu33B104c04b1.pep
NHLHCCANPRHCSSFPIEYTKTNLSSLLGPMREYPTMCKSIFIVKKAAHSSQTSYPIIR

SEQ ID NO: 111645 - protein, 64 aa, Gossypium hirsutum
  Clone ID: uC-gsronu33B104c05b1.pep
LKFQQKLEVKEKAHRLFATLRQLRVCIAGDLAEEMNLSHASPHPVQDLPTTDGGLRLGGGHNTT

SEQ ID NO: 111646 - protein, 168 aa, Gossypium hirsutum
  Clone ID: uC-gsronu33B104c08b1.pep
MGVSNNITAVLNIVALLCSIPIIAAGIWLDQKPDNACVHLIRWPVILLGFLILLVSLAGFVGAYRYKETLLAFYLCCMAILIALLLILLIFAFVVTRPDGSYDVPGKGYKEYRLDGYSAWLREHVVDNKSWRKIKACLADTGVCPKLTQKFITADQFFAAHISPLQLG

SEQ ID NO: 111647 - protein, 96 aa, Gossypium hirsutum
  Clone ID: uC-gsronu33B104d03b1.pep
MDDLPPSLVVDILSRLTDSADVARRRVASKTLNSLTREVRSLNLLCTLSRYLKSRSPETKDHVTPFKAIFNNLVGQAPCLNSISIGVDKSLRNISY

SEQ ID NO: 111648 - protein, 56 aa, Gossypium hirsutum
  Clone ID: uC-gsronu33B104d07b1.pep
KKNKTGQPRGRTLGTLKAAPPTTVFLFSFYFFFFFFFFFFFFFFFFFFFLFFFGRE

SEQ ID NO: 111649 - protein, 118 aa, Gossypium hirsutum
  Clone ID: uC-gsronu33B104d10b1.pep
MIPADSSGRSFLVKLPDGKDFYYWCSERSKLLGVELLSKMKDLIKRKPSIAELTGISESRLGCFATQLHAYLLGSSVNPEASCSSSPLPSTTHDAIVVHNGQSSSATSKSLRSRHSSS

SEQ ID NO: 111650 - protein, 63 aa, Gossypium hirsutum
  Clone ID: uC-gsronu33B104e02b1.pep
PKYMTRELHHNLSAFTCPNSNILGYSCVGQYQRTNAVPSPVPSKLSSPLILDINSSKALPAGQ

SEQ ID NO: 111651 - protein, 58 aa, Gossypium hirsutum
  unsure (1)..(58): unsure at all Xaa locations
  Clone ID: uC-gsronu33B104e03b1.pep
HQNTGHWPTIYNLGTGXPLPFPNLFGLYPFPLLPVGVIGQRPSPFALPNNCCMLNGKW

SEQ ID NO: 111652 - protein, 107 aa, Gossypium hirsutum
  Clone ID: uC-gsronu33B104e05b1.pep
TNLDRFLEFTTPVVSAQYLPKTSIRGCRGQERGLECPPYFALKDLRESFKEWSAYGAGVPLLLNGSDSVMQYYVPYLSGIQLYDDQSRPSPRQRMPGEESVTESSRE

SEQ ID NO: 111653 - protein, 74 aa, Gossypium hirsutum
  Clone ID: uC-gsronu33B104e09b1.pep
HIPPPVMPPPAMQYRPPLPNMPPPPPPQSVSGLSRPPPPMGMGAPHGWPQQQMGGRPPMLQMSMPPPPPPPSAS

SEQ ID NO: 111654 - protein, 57 aa, Gossypium hirsutum
  Clone ID: uC-gsronu33B104e12b1.pep
SAQSQDVEVDTFLHFIDPFYTGRYTVESNTESLMSDVGDPAPARHIYSVTFADPFDS

SEQ ID NO: 111655 - protein, 137 aa, Gossypium hirsutum
  Clone ID: uC-gsronu33B104f03b1.pep
KLYFLSRMDVLGVHQMKNKKKQFKRRDCKKVIKVVYISSPMKVKTCASQFRALVQELTGKDSNAAVRFMDNDDNVSDHSPAYSDSTGVERVLELPLANTNHQSMFESYDEGSFWAMFTSNLFHDPSQLDTFRSFGST

SEQ ID NO: 111656 - protein, 174 aa, Gossypium hirsutum
  unsure (1)..(174): unsure at all Xaa locations
  Clone ID: uC-gsronu33B104f04b1.pep
GFSQNAGLDYQDTFSPVVRATTIRTVLAISIMKNWSLRLADVNNDFLNGELAEDIYMEQPPGFEEFGPNGEKIVCKLNKPLFAHGSKHSNSISLXQLGFRAAKADLSLFIHAASDSILLLMTYVDDIVLKSSSNSKIDRVVXTTSYKICSKKYGTLTFFLGITVEQSSTGLFLS

SEQ ID NO: 111657 - protein, 81 aa, Gossypium hirsutum
  Clone ID: uC-gsronu33B104f06b1.pep
GHDTAELVMHGLGHEMTEVAFKLLGGDEMEESKIWTGTGQGREGAHGIGIVGHCTTAYAKLIEGLVHSEYCVQALIERTTG

SEQ ID NO: 111658 - protein, 133 aa, Gossypium hirsutum
  unsure (1)..(133): unsure at all Xaa locations
  Clone ID: uC-gsronu33B104g02b1.pep
WVLSDPDFNHTDETLSFFVDYFGRRKDFKAAHDLLVNHKSVAGPKTLNSSIDRLVRAGRPTQVLGFFERMEKDYGFKRXDKESLKLAVEKLCENGYASYAEKLVKDSANEIFPDEMICDLLIKGWCVDGKLAE

SEQ ID NO: 111659 - protein, 84 aa, Gossypium hirsutum
  Clone ID: uC-gsronu33B104g04b1.pep
KNEKRGEKKKKHKERKEPLKARDNKTEKKGEKPRTHAAVNDPREEGGTKQQTRRATVKTRIESRPSTKHPQQTTRLRHRTNKSG

SEQ ID NO: 111660 - protein, 172 aa, Gossypium hirsutum
  Clone ID: uC-gsronu33B104h12b1.pep
MVSGSGICAKKVVVDARHHMLGRLASIVAKELLNGQKVVVVRCEEICMSGGLVRQKMKYMRFLRKRTNTKPSHGPIHFRAPAKIFWRTVRGMLPHKTKRGAAALARLKAYEGIPAPFDKIKRMVIPDALKVLRLQKGHTHCLLGRLSSEVGWNHYDTIRELEKKRKERAQVA

SEQ ID NO: 111661 - protein, 119 aa, Gossypium hirsutum
  Clone ID: uC-gsronu33B106a03b2.pep
LRSLSIRNCRGLGDASSAALEKMRPQLQNVELRGLHGITHVALLPLLESCEAGLTKVNLNGCPNLGNTDVSQMAESHGRSLKMLSLDGCRNSDADLSAIAENCEWLIDLDEYKCTVTDS

SEQ ID NO: 111662 - protein, 87 aa, Gossypium hirsutum
  Clone ID: uC-gsronu33B106a07b2.pep
ASARMKTARMRETASRQEVRLAQQPAKSTLPSPPAGSPLHERFDYASSNHAANRFGTGDRMRTLLARESCVKQGGQTTLSSERGITY

SEQ ID NO: 111663 - protein, 185 aa, Gossypium hirsutum
  unsure (1)..(185): unsure at all Xaa locations
  Clone ID: uC-gsronu33B106a12b2.pep
SHKVHHHHHQQGVLLNEGSGYNISCGVIQDVWCGPGIGFSADAVGSVDRVATRRNVPARGKIDVEKPSYIARLTVNSETLSFLDSDSAFISSRPEPDFFGSRYYRHARHPSTEGLAEIVMLQNIFLVGGRLDSRDRFSDWRLDIDSMSYEQLLELGEKIGHVNTGLKEDEISRCLRXMKGSVMND

SEQ ID NO: 111664 - protein, 101 aa, Gossypium hirsutum
  Clone ID: uC-gsronu33B106b02b2.pep
KKFLVKYNNILIAKPYMKPSSWLVSLRGLSKPSSIVHGDCLLLHPSGRAFFGVPPSPPLGGPFFSSSLGLFHLMILPLFVLPAAWIPLVVPPSIVAGPMPL

SEQ ID NO: 111665 - protein, 70 aa, Gossypium hirsutum
  Clone ID: uC-gsronu33B106b08b2.pep
SRENYSTSMLLCGARGDANAPAKSLFWQPRKGHSYVLTFESERDRNAAIMVARKHALDCSVMLGGPDDEM

SEQ ID NO: 111666 - protein, 66 aa, Gossypium hirsutum
  Clone ID: uC-gsronu33B106c01b2.pep
KKKKRGGRLGGPIYDPRFMPRACYFFGSPKVKPKSNFLPVVIRQNHWETHLITLLKHPALHTCLNS

SEQ ID NO: 111667 - protein, 45 aa, Gossypium hirsutum
  Clone ID: uC-gsronu33B106c12b2.pep
WLRHDLHWLPPHVLKQELMPLAKYRGTRMQPTSTSCESSNTFYLT

SEQ ID NO: 111668 - protein, 24 aa, Gossypium hirsutum
  Clone ID: uC-gsronu33B106d05b2.pep
QYKHYKPLVTNSANNTGIGIFIRP

SEQ ID NO: 111669 - protein, 99 aa, Gossypium hirsutum
  unsure (1)..(99): unsure at all Xaa locations
  Clone ID: uC-gsronu33B106d12b2.pep
STSIAADADGGVPXFWGTDAKSHLELADDRXTVMKGXWKTFDPFPKGRFFTFXAGLRTYEHTLNESKPKPXVDREGHDCGATLKVDAETKMESTVMKKG

SEQ ID NO: 111670 - protein, 75 aa, Gossypium hirsutum
  unsure (1)..(75): unsure at all Xaa locations
  Clone ID: uC-gsronu33B106f05b2.pep
KGPPILFFFFFIHYYLIFVFFYFFCPFFFFFFXFFSFFFFFFFFFLLLTNSITNFLLNGIIYTITHRNTHTQNNG

SEQ ID NO: 111671 - protein, 55 aa, Gossypium hirsutum
  Clone ID: uC-gsronu33B106g02b2.pep
IGVMRLSMKGSLNSLLITSPLNTARYRGPPLVQSGKLMRKSLSVYSNNFRDKSVY

SEQ ID NO: 111672 - protein, 65 aa, Gossypium hirsutum
  Clone ID: uC-gsronu33B107a02b1.pep
TYTTSRTIYCKFRESTSLHNLDNTIHQACTATKQKDHQALSLCGTTSLLFLKQVQASIKSSNTRI

SEQ ID NO: 111673 - protein, 126 aa, Gossypium hirsutum
  unsure (1)..(126): unsure at all Xaa locations
  Clone ID: uC-gsronu33B107a06b1.pep
SLLHPDQRVEYERGTFNNDLCGERCDEPTIMILNLKGXPQILEKGGYTLFTPHYITWYCPQAFIFSSQCKSQCINHGRYCAPDPQQDFGEGYQGKDVVFENLRQLCAHRVANESNRPWILWDYVTD

SEQ ID NO: 111674 - protein, 120 aa, Gossypium hirsutum
  unsure (1)..(120): unsure at all Xaa locations
  Clone ID: uC-gsronu33B107a09b1.pep
PNGLGCVLIQDAKVTAYAYRQLKPHEKNCSTHDLXLEAIIYALQICRLYLYGEKCHIFTYXQRLKHMLTQNELNLKRKWLELTKYYDLVINXHSXKANVVANTLSQKSLLILKEINTHLI

SEQ ID NO: 111675 - protein, 41 aa, Gossypium hirsutum
  Clone ID: uC-gsronu33B107a10b1.pep
CLLIFKAYYCTTSSVIKGHLKKLFKRNMVYLKRRIHCVYQV

SEQ ID NO: 111676 - protein, 138 aa, Gossypium hirsutum
  unsure (1)..(138): unsure at all Xaa locations
  Clone ID: uC-gsronu33B107b02b1.pep
WLARLYGPGLTGWTDARALAYGIRGTNSCGERMQIGDHVHWACCNHREPPLRTRSYAAKDEPFCSDEGALDTCWSQSTSMVWASXANDVTMSIADYXPIRDRAPNPTDHDVSHVNVSFDFIVFGKTTFTTGVDPDQFG

SEQ ID NO: 111677 - protein, 77 aa, Gossypium hirsutum
  Clone ID: uC-gsronu33B107b09b1.pep
MEIIKKREDKLVGGEADSSGDDYLGLLVNAYHDSNDKHKLSLEDLVRECKTIYYAGQSTLNSLLRWIALHYAIHGDW

SEQ ID NO: 111678 - protein, 67 aa, Gossypium hirsutum
  Clone ID: uC-gsronu33B107c02b1.pep
RLFATPACTNNADFHIAKPMTRPGGTADPMKCTRTNPRLAGTDGEAAILCRYAPLDARQCNHAVHML

SEQ ID NO: 111679 - protein, 59 aa, Gossypium hirsutum
  Clone ID: uC-gsronu33B107c03b1.pep
RGARLITSLAGCPRELVSAPSTWNRRCPKRPYPYAQLSTRCISMQPRRDCSQQQGIRGQ

SEQ ID NO: 111680 - protein, 54 aa, Gossypium hirsutum
  Clone ID: uC-gsronu33B107c07b1.pep
DRCLILAEYIQFRGHHIPATKCSAELVSLDPHDRPPHCSESILVLLLIFCIALI

SEQ ID NO: 111681 - protein, 89 aa, Gossypium hirsutum
  Clone ID: uC-gsronu33B107d01b1.pep
DTHTAGHTAHTGNSTIMGRDPRHREGLTDEAKQQTGDSPKPQGGAPESEARSSGSRNYVDHTVLEGSENQGTHGKSTKRNRDHHQRKRI

SEQ ID NO: 111682 - protein, 177 aa, Gossypium hirsutum
  unsure (1)..(177): unsure at all Xaa locations
  Clone ID: uC-gsronu33B107d04b1.pep
KALEGLHGVQVFAHSQSALEEINQQGDFQSSHDKSFITANQPLLMQVWQQRPACLRPVRCCMQXLVETVANVLTSLPFIALGIQAPRRNFNTKLYANSLIGVGVASTLYHSSRGKLRKYLRWAYYTMIATAXVCLSRAIPNENPKXLMAATALLLPVQPLMASAIHTXNDEVAFAKE

SEQ ID NO: 111683 - protein, 137 aa, Gossypium hirsutum
  Clone ID: uC-gsronu33B107e01b1.pep
SLFISKSLTASEGSASTPAASTMGELSNDHKNGKRRNSFSSTRPENIDEEPRDSNSSNPLSRVMQATEAARAKVNTNNSPGSSADVQDRDIYIKKRHSLPGANGRQGSARIHRSLSRAQQGAKRNGTNPTQERRWQR

SEQ ID NO: 111684 - protein, 114 aa, Gossypium hirsutum
  unsure (1)..(114): unsure at all Xaa locations
  Clone ID: uC-gsronu33B107f02b1.pep
TSRSIGAYLSAHEGPHILRSRPQARNAPLKASMTATDEPGYYEDGTLEIGLENVLAVTEADTEYNGDDXGYLSFEHLTWAPYQIKMLDSRLXTPEEIAWQTTCHSKCTAILAPS

SEQ ID NO: 111685 - protein, 147 aa, Gossypium hirsutum
  Clone ID: uC-gsronu33B107f03b1.pep
ILFLTGSFTFSENGGVKSRTGGLSVSLAGSDGRVIGGGLAGVLLAASPIQIVVGSFMLNGYKVHKRKPYREQHTVAASAVATAPSAMAMAEEGRPIISQAKLDCENNVKPTCAFQVGSLEEASKNITDHKNIANIAAASIDSGWNNG

SEQ ID NO: 111686 - protein, 112 aa, Gossypium hirsutum
  Clone ID: uC-gsronu33B107f09b1.pep
HLTSELWSQITWVSISRAIAMFCFHYTVEFPLSVPVLSRLFVVRGWLYEGSRSQCVQRPARVVYALTAGAARAVRATYWVRVWYTRAQPSEPSLAFRLRILSECLSCGHMTR

SEQ ID NO: 111687 - protein, 127 aa, Gossypium hirsutum
  unsure (1)..(127): unsure at all Xaa locations
  Clone ID: uC-gsronu33B107f10b1.pep
MFLKVQMPWNVIIPADSLDAKGLMLKKAIVIRLMDEFACKKATKDRGYFMAVTTLESIGEGRVRPEHRDVLFPVVFSGITFKMYRGEILKGVXHKILKXGVFLRCGPIQNIYLSHIKMPDYHYVPRE

SEQ ID NO: 111688 - protein, 156 aa, Gossypium hirsutum
  unsure (1)..(156): unsure at all Xaa locations
  Clone ID: uC-gsronu33B107g02b1.pep
RKWHLSLPIMATLHRLAGQLLSDLIDRNYFYLFDMESFFTAKALNMCIPGGPKFEPLYRDMEKGDEDWNEFNDINKLIIRSPLRTEYRIAFPHLYNNRPRKVKLCVYHTPMVMYIKTEDPDLPAFYYDPVIHPITTTNKEPREKKXYDDDDEDDFV

SEQ ID NO: 111689 - protein, 72 aa, Gossypium hirsutum
  Clone ID: uC-gsronu33B107g07b1.pep
KDPNYRYLFDMGWGLQIGPRPCASRGGPKIEPIYRDMDNRGCRTVYNLSDVNTLIIRTSITSEYIPAFPHVY

SEQ ID NO: 111690 - protein, 84 aa, Gossypium hirsutum
  Clone ID: uC-gsronu33B107g09b1.pep
LISNPKAMISLFPIQFYQIISARKKNLRTPFFLGFFFLSILMEAMYLAFHHHFLSYSCHLYACKRTMFITFLIIPRSFKKNIEE

SEQ ID NO: 111691 - protein, 92 aa, Gossypium hirsutum
  Clone ID: uC-gsronu33B107g12b1.pep
TYTSSDTTLSYFVPFRNLFEQHLPEFSRLLLYLLFENQYLELLELLDFVLSNHLHDQILVQIYRQLCYFLLETQKCCCSPFHFPCFNSPKPL

SEQ ID NO: 111692 - protein, 123 aa, Gossypium hirsutum
  Clone ID: uC-gsronu33B108a10b1.pep
YISRDQVQKNVGLHITITAEDVYGGHLNRCPESKLDMLAQKGCVTDEPYENDIGYHEDFSGLEKQHCFFGGCSDGLNSSQTEEDIDMELQRRSKEAEDRVLLLSEALGQETFLRDVGFNVSSL

SEQ ID NO: 111693 - protein, 136 aa, Gossypium hirsutum
  Clone ID: uC-gsronu33B108a11b1.pep
EYIGLVQDWCFLTQVIGDLMWQIDCKPLRKLYFIGITAVRLLPHLYDYIRAPVPNPYFAEEYEFVNPTLDFFSNFGDVAIPITAGLLAAVIYCQQRWNYDQLSQILTFKQCKLVAARSRAYEKLSSKPFEAELASD

SEQ ID NO: 111694 - protein, 54 aa, Gossypium hirsutum
  Clone ID: uC-gsronu33B108b01b1.pep
TPYYDSYYSSYLKHYSLGKAADRKSSSSANTCRFLDFIRKLTASSSNFRMKEKM

SEQ ID NO: 111695 - protein, 64 aa, Gossypium hirsutum
  Clone ID: uC-gsronu33B108b10b1.pep
YLSLVVFSDQDTVLTFGCLFIIRKMRNEVVFRAGQPSSINFIREAQNYSDTVREALEAISYNGR

SEQ ID NO: 111696 - protein, 63 aa, Gossypium hirsutum
  Clone ID: uC-gsronu33B108d07b1.pep
MGSQNFLQVVAKNFDVLALPLVTLVYPLYASIKAIETRSNNDDQQWLTYWVLYSLITLFELTF

SEQ ID NO: 111697 - protein, 56 aa, Gossypium hirsutum
  Clone ID: uC-gsronu33B108f04b1.pep
AVTDTKTATSSLPQTRHVACICYSRYPAIYKLIYYLNTQNPIIFYSSIYIVYYLFS

SEQ ID NO: 111698 - protein, 45 aa, Gossypium hirsutum
  Clone ID: uC-gsronu33B108f05b1.pep
RLSSFRYGLVIYLESFIHYLFNGPHLASDTQNTPPCMCFFFKFFN

SEQ ID NO: 111699 - protein, 123 aa, Gossypium hirsutum
  Clone ID: uC-gsronu33B108g06b1.pep
PIQLKSYLVKLDGGLHNVNIIVLIILTSHNNIHVQFWSAPKRFPQPFQFSVADPTHLQFNVSASIHRASTFCIPIPDCIEHPKILSDAIETLLDPNFYPDKDIKIVTDEKATTLFHESINYTA

SEQ ID NO: 111700 - protein, 139 aa, Gossypium hirsutum
  unsure (1)..(139): unsure at all Xaa locations
  Clone ID: uC-gsronu33B108h01b1.pep
HLYGDLICEMWRESYQPDXGAPPRPQTDETAFGNGGGWTISGTPLDQRDSRLLAIAEAERQLSETGSDEYAAXSNATGAAYRRSAAEIVMALLLLHDAVTDPDAASDDDVSSFFYIIXLRAAGFLXPCYIMAWAISVLQ

SEQ ID NO: 111701 - protein, 90 aa, Gossypium hirsutum
  Clone ID: uC-gsronu33B108h11b1.pep
SHNALHFRVVFLIQDIWGDSTSTQQREESHGLFTWCVWRGAADMARPLVRCDAKASRSFTVWGCCGACGAWRLQKPLGFLKEFRHWAFLG

SEQ ID NO: 111702 - protein, 88 aa, Gossypium hirsutum
  Clone ID: uC-gsronu33B109a02b1.pep
IKKIRGSNKNIMGLHIEGKTNITTLHEAALPSFAVADVDVSPPFVSLTLVFSLLCTDSHFDFHSCSVCKVAAFPGDLSAKLLVNLALP

SEQ ID NO: 111703 - protein, 67 aa, Gossypium hirsutum
  Clone ID: uC-gsronu33B109b07b1.pep
DLKVHGSIPACCTGMTVLIWSRLLLTYSQLILADGNYQLNRQYHTDYMRVQCQVLRIRNKCECARIP

SEQ ID NO: 111704 - protein, 145 aa, Gossypium hirsutum
  Clone ID: uC-gsronu33B109d04b1.pep
VFEGFMNMFLEEEADFAITMIEAFGGRMDEIRENELPYPHRAGILFESTYIVQWTNEAEAGRYISWIRRLYSYMASYASKSPREAYYNYKDLDLGTNNIVGYTSYEQASVWGLKYFKNNFKRLVQIKTKVDPMNFFRNEQSTPPL

SEQ ID NO: 111705 - protein, 48 aa, Gossypium hirsutum
  Clone ID: uC-gsronu33B109d09b1.pep
QFWSNSHSPNTKYKIILIITIGSLAAERSLATGPDAWADAWADAWANA

SEQ ID NO: 111706 - protein, 132 aa, Gossypium hirsutum
  Clone ID: uC-gsronu33B109e08b1.pep
MAISYIHLFILSFVSISRFLEISKAGAESELVADLLTLQSQSESGVIHLDDRTVSKFITSTKTPRPYSLLIFFDAIPLHDKSDLRLPVLVHDFALAASSFIANHNSSNTKLFFCDLEFRESQSSFKLFDVNA

SEQ ID NO: 111707 - protein, 54 aa, Gossypium hirsutum
  Clone ID: uC-gsronu33B109e11b1.pep
FSRSIVGVKDVRDPNTTTVKKINGEYDHKSQANVYDDNHDNDDGSVKGTELPTD

SEQ ID NO: 111708 - protein, 131 aa, Gossypium hirsutum
  unsure (1)..(131): unsure at all Xaa locations
  Clone ID: uC-gsronu33B109g09b1.pep
MRAVDTVVDVGDEDADAGAVATAAGGGEGTAVKGSFNAADLRSHLMSQYMSAQMSPIQPLRMLDPTSYPNRSHVLLDKVPVEVSDQYEDLSVKAKIXLSILLQTMSQAMTLGAIARTWHASARAIVYEHAQ

SEQ ID NO: 111709 - protein, 53 aa, Gossypium hirsutum
  Clone ID: uC-gsronu33B109h01b1.pep
HWGIINTTAKLRVKKKKKKKKKKKKKKKKKKRGERSKRKTKLKKPKQAKEKIL

SEQ ID NO: 111710 - protein, 46 aa, Gossypium hirsutum
  Clone ID: uC-gsronu33B109h06b1.pep
PVRSALLGSIKGFGGGSVYFLPSKQANHANQYILSTKTHSTDKINE

SEQ ID NO: 111711 - protein, 65 aa, Gossypium hirsutum
  Clone ID: uC-gsronu33B109h08b1.pep
KHQSVCTCPHIIDARRPHITRDASMSLHMDTGATNEHVESIVSSTYTHINRSISLASKLKRNPVE

SEQ ID NO: 111712 - protein, 63 aa, Gossypium hirsutum
  Clone ID: uC-gsronu33B109h10b1.pep
FNGINTGWNGWCENAAIAAAPEVLSYYIFHVSYTKFPMQILYKLTTFGQLLFLVFIFCLSCSC

SEQ ID NO: 111713 - protein, 139 aa, Gossypium hirsutum
  Clone ID: uC-gsronu33B109h12b1.pep
SFDSAVYCHQTGELITLPYNAAMPVSLKVLEHEIFTIAPIKNLAPGFSFAPLGLINMYNSGGAIVDLKYEFKDGAKLSELDIEYGSESSGLNVRAENSSNELVGKVCMEIKGCGNFGAYSSAKPRKCSVGYSEVQFDYD

SEQ ID NO: 111714 - protein, 56 aa, Gossypium hirsutum
  Clone ID: uC-gsronu33B110b02b1.pep
LHLSQLHFMCFPGLFSPCKISSSAHASLWSSQNLQLTCSPFLMSLIPTREYCTGLW

SEQ ID NO: 111715 - protein, 67 aa, Gossypium hirsutum
  Clone ID: uC-gsronu33B110b10b1.pep
FKSFNSLIESCYNPLSNQCYLLLNEVQIPRQVRKDVHNMERVEMVPLEKRCSHTPSTPLPHCSSHIP

SEQ ID NO: 111716 - protein, 89 aa, Gossypium hirsutum
  unsure (1)..(89): unsure at all Xaa locations
  Clone ID: uC-gsronu33B110c07b1.pep
SVRVIQRNLVYIVGLPLGLADEDVLSHSFLLRMFSNXLFSLYHDLNMHLCVQLLQQLEYFGQYGKVLKVSMSRTAAGVIQQFSNNTCSV

SEQ ID NO: 111717 - protein, 73 aa, Gossypium hirsutum
  Clone ID: uC-gsronu33B110d03b1.pep
TQYPKITRSLSGHTLGLILYVHQFKSPRFHQGICICLSYVRIHGFSESLLSVGACEFAPDYTCRKRPCRSARV

SEQ ID NO: 111718 - protein, 75 aa, Gossypium hirsutum
  Clone ID: uC-gsronu33B110f09b1.pep
FFFLSFFFQVNDGSMMKNVSKLLFHLPFFWSFFFSDANKFKLIRHDLRLELVLCSSLSLLYFIYPFMHFFKIMPS

SEQ ID NO: 111719 - protein, 39 aa, Gossypium hirsutum
  Clone ID: uC-gsronu33B110f10b1.pep
GLLKNVLGLGYFGAVWVNCFCNFGFSYVELFGSYLLGWN

SEQ ID NO: 111720 - protein, 50 aa, Gossypium hirsutum
  Clone ID: uC-gsronu33B110g02b1.pep
KQKQNQLIKKSKFFTKIKAQSKIPNPKAQTPKKFSAALEASGTCQNRPES

SEQ ID NO: 111721 - protein, 46 aa, Gossypium hirsutum
  Clone ID: uC-gsronu33B110h03b1.pep
YIEQRSQKRRNYQKSSQNHTLIKLGSSRISKHKNPSLSFFNFGKMR

SEQ ID NO: 111722 - protein, 87 aa, Gossypium hirsutum
  Clone ID: uC-gsronu33B110h05b1.pep
ARVFPVTTFLNLGQLILFWCPYKKNFAFHARGRKIWFFKTAPPFFFFFFFFFFFFFFFFFFFFFFFFFFFFFFFFFFFFNINHKIKM

SEQ ID NO: 111723 - protein, 150 aa, Gossypium hirsutum
  Clone ID: uC-gsronu33B111b03b1.pep
FIKDRLWHILDRASIEKKSVDLQDLLLRLTFDNICGLTFGKDPKTLSPELPENSFAVAFDTATEATLYRFLYPGLLWRLEKILGIGVEKRLKRSLQIVENYMNDAVEARKEAPSDDLLSRFMKKRDAEGNLCTSDVLQHIALNFVLAGRD

SEQ ID NO: 111724 - protein, 136 aa, Gossypium hirsutum
  Clone ID: uC-gsronu33B111b10b1.pep
KVVLNTLLNTLSLNYLSVLIIKPRTGQTSLFVCLLLLLLHAHFSLPYTSTWTTTLAIPLGPPISSWDSWLNFLLASPNASKPLEVDPPEKTIPTPDPTLRAFSSNSVLSRLLLIISPNLIASVIVALVRSTRYVNK

SEQ ID NO: 111725 - protein, 51 aa, Gossypium hirsutum
  Clone ID: uC-gsronu33B111b12b1.pep
IQGLDPKTTASLFAKAQCLGEKRIGDEDCFVLKVCADRATVMETNEGPAEV

SEQ ID NO: 111726 - protein, 90 aa, Gossypium hirsutum
  Clone ID: uC-gsronu33B111c04b1.pep
GGGQRRVLLGGLSKGGVGALCAIYVYWTDEGDIVAGVSMVPSPYGGSPIASDILREGQLGDYVNIRKLMEILICKVIKVWSYVLCIFFSL

SEQ ID NO: 111727 - protein, 129 aa, Gossypium hirsutum
  Clone ID: uC-gsronu33B111c09b1.pep
MAKTKRIIITILLRLLAFGATLSATVVMVTSHESAEVMNIKFSAKYSNSPTFKFYVTAEAIATGYGLIALFLSSRRSFDRLIVILDVVIALTLTSSISAALAVAQIGKKGDTHAGWLPVCNQSSKFCDH

SEQ ID NO: 111728 - protein, 62 aa, Gossypium hirsutum
  Clone ID: uC-gsronu33B111c12b1.pep
PPLFFFFFFIKISTKDIGFINFMLFFMTLFFENRIKHHGLNEIIPDLINPKRTEKTKQTLSK

SEQ ID NO: 111729 - protein, 73 aa, Gossypium hirsutum
  Clone ID: uC-gsronu33B111d02b1.pep
LSNQYAHSSHSVKHNSQPNIAFLGWCPSGNPQTCLERSCWKKQIIALPPTRPGRYFYKGVEILLGEISGRIIF

SEQ ID NO: 111730 - protein, 77 aa, Gossypium hirsutum
  unsure (1)..(77): unsure at all Xaa locations
  Clone ID: uC-gsronu33B111e03b1.pep
PLSFLIPLSLGCNVLSRKIWRASRYEQLVDENCHHLQMLIKPSLGLCFNRTHSHLICGYPLKFLKXCPMVRTAWASV

SEQ ID NO: 111731 - protein, 89 aa, Gossypium hirsutum
  unsure (1)..(89): unsure at all Xaa locations
  Clone ID: uC-gsronu33B111e08b1.pep
FILGFSVFMGLGVPHNFNEYTVVNGYGPVHTSSXWFNDIVECTILILSYLSVMLDIXLDNTLDRMDSRIRKDKGQHWWYKFQSFKGDSR

SEQ ID NO: 111732 - protein, 140 aa, Gossypium hirsutum
  unsure (1)..(140): unsure at all Xaa locations
  Clone ID: uC-gsronu33B111g07b1.pep
PCLRVHKLELAGELDLHDVVSFDAVFGKMLQEVHLLVRLKQXLDSLGGDNSDALSDLQSLGASIXDICLDFTLEGYPDYILELGDDTVDINNLEEYVSSVADAAVKTGMVHQMDAFRDGYNQVLEILSLQKDTPQELDYL

SEQ ID NO: 111733 - protein, 68 aa, Gossypium hirsutum
  Clone ID: uC-gsronu33B111g09b1.pep
ISVNWPTLNTVLTPKTLGVRQVITMVAHHSFCHLTKYLKGPDHIAFAITGLTDCGRVLSRYMRNKCIN

SEQ ID NO: 111734 - protein, 160 aa, Gossypium hirsutum
  unsure (1)..(160): unsure at all Xaa locations
  Clone ID: uC-gsronu33B111g10b1.pep
FCFACIDNWGAITNLCPVCQSEFQLITCVPVYDTIGSNKVEDETFSREDDWSIEGKSNTLSFPSYYIDENXICLDGDGCKVRSLSTTIEGDPDLDTSIACDSCDIWYHAFCVGFDTEGTSEDTWLCPRCVANQASQESGVVLEKKNTPLGPEIANGEYVT

SEQ ID NO: 111735 - protein, 30 aa, Gossypium hirsutum
  Clone ID: uC-gsronu33B111g12b1.pep
RLSPTEPISPSTKVIYINPPGTLNIIGREG

SEQ ID NO: 111736 - protein, 54 aa, Gossypium hirsutum
  Clone ID: uC-gsronu33B111h02b1.pep
PHYNKARPPGPTHPYFPDPPTRPFSHTTTRTSKQGHIKTPWRANDILYSDIIHL

SEQ ID NO: 111737 - protein, 160 aa, Gossypium hirsutum
  Clone ID: uC-gsronu33B111h05b1.pep
FDGQKMGPFCLVRCADRTGRLIIDDALRTTKPVIAKVREFVQELNASLDISEDFIQLATAYKEGSWQFPLDASARWSGSYQMLDIVQKAGKSMDAVVRKNEEMLGNRMLLNTAEKNVVNIVHNYLEPFYKVISEICVNTPPTIGMVIVYMDHISDTITTR

SEQ ID NO: 111738 - protein, 148 aa, Gossypium hirsutum
  Clone ID: uC-gsronu33B111h06b1.pep
MASATCSIFWSGSLYFAEGSSHSSDYKLITSLPFFCSFSPISSLKLSHHSLPVLPKRAFRVLASDSTTDPHEITDSSGAESTIDTKLPRRSLLVQFTCGECGERTERLINRLAYERGLVYVQCAGCLQYHKLADNLGLGVEYDLRDEM

SEQ ID NO: 111739 - protein, 55 aa, Gossypium hirsutum
  Clone ID: uC-gsronu33B111h11b1.pep
RIVNLMKAWGRSCGISRRGGPFNMCGYKIVYKLFLFPPHFLYKPPPVCYVLLYEK

SEQ ID NO: 111740 - protein, 64 aa, Gossypium hirsutum
  Clone ID: uC-gsronu33B113a06b1.pep
HIGSSHLPIDNRVTAYKPAICLELDPICILCLIINHQVTNGIVWINPLNSTRSPPVLHLQPMPK

SEQ ID NO: 111741 - protein, 71 aa, Gossypium hirsutum
  Clone ID: uC-gsronu33B113a07b1.pep
ATAVLPRLMSRPVARTVRPSACKGVRNGPRCGHVGCRAGCLLRDVLVGDRVGLPGGFAGHVGSVICPLVSL

SEQ ID NO: 111742 - protein, 52 aa, Gossypium hirsutum
  Clone ID: uC-gsronu33B113c02b1.pep
TNLLPPLGNENKAQLLGMSMSNSAAEQTVSFHTSGAPNFNLLNKFNVGGRVG

SEQ ID NO: 111743 - protein, 117 aa, Gossypium hirsutum
  Clone ID: uC-gsronu33B113c06b1.pep
MWLPLYMRMPRCQYRNIAQIAKVKVMRKQGQWEDLKIPRSIGSIVCLNLPSFSGGFNPWGTPYRKKFLDRGLTSPFVDDGLIEIVGFRNVLHGLVLLAPKGHGTRLAQANAIRFEFK

SEQ ID NO: 111744 - protein, 133 aa, Gossypium hirsutum
  Clone ID: uC-gsronu33B113c12b1.pep
MAKRVNEIIIFAFVALFSKAIGAKPYWRTRWPIDRVSTECLTWQLAVEANNVRGWRIVPAHCLSHIEAYMTGGQYEQDVDYIVEQIESYVSELVVGEDGMDAWILDIDDTCLSNVIYYKKKKYGCEPYDPMAF

SEQ ID NO: 111745 - protein, 87 aa, Gossypium hirsutum
  Clone ID: uC-gsronu33B113d02b1.pep
AADRSNSRSTQRLPHPREQKPGPRVDSRCRSAHETIMRRGACTNKQRKQTEKTANAKRQGPMEAKKVIQSRLIAVVEESEGGHIQNG

SEQ ID NO: 111746 - protein, 41 aa, Gossypium hirsutum
  Clone ID: uC-gsronu33B113d06b1.pep
FCHNHYKVQFDSITRGKVMEINDQPCNLKGSTLFSKFPDAW

SEQ ID NO: 111747 - protein, 99 aa, Gossypium hirsutum
  unsure (1)..(99): unsure at all Xaa locations
  Clone ID: uC-gsronu33B113e01b1.pep
GKPASERQIFNLSGPLHLTSIDWNNFHHRRSVAASLVQGVYIQERDRQENRRGAQAHASPWWDFFNFXLIRPLVDDVDNSIFGAIYENKSFTSNSSHSA

SEQ ID NO: 111748 - protein, 87 aa, Gossypium hirsutum
  Clone ID: uC-gsronu33B113f06b1.pep
LKLRLKSGSTVSISSQQKRSFKSRFLSFLEKIRLRRERKGLTIQHSDVKSVLNRVKQFADRVFEVFALSYFWSNCGFNPISILNFKI

SEQ ID NO: 111749 - protein, 38 aa, Gossypium hirsutum
  Clone ID: uC-gsronu33B113h02b1.pep
SILRTVKPYRRPRVNLKAESVSTAGETHCPYPGSHSLS

SEQ ID NO: 111750 - protein, 49 aa, Gossypium hirsutum
  Clone ID: uC-gsronu33B113h03b1.pep
KGEEGFSRGGSLNPVRTGPLTVPKVIYEQGVEALPIALKTCPITRVETS

SEQ ID NO: 111751 - protein, 40 aa, Gossypium hirsutum
  Clone ID: uC-gsronu33B113h07b1.pep
ILNSGRSKLTDAPGLIFMLTRFQPLSNYIDLTMIHLSPKR

SEQ ID NO: 111752 - protein, 86 aa, Gossypium hirsutum
  Clone ID: uC-gsronu33B114a07b1.pep
MVISGDGSSRSKSTMWGWLLVGIGSLVLLGFLFTAFISHLLPPSNYTLIAAIQNDRYYCFLVPLTLPVLVVAVYFHWLSMKLFRHA

SEQ ID NO: 111753 - protein, 53 aa, Gossypium hirsutum
  Clone ID: uC-gsronu33B114b08b1.pep
ILRYQTFLFVVKVDCQVVDAILLLYFVDSVTMLYNIVAALQRHYAVLQALALA

SEQ ID NO: 111754 - protein, 154 aa, Gossypium hirsutum
  Clone ID: uC-gsronu33B114b11b1.pep
ISAVVKELEDLKKVVMKGENEGEIKKGTFDPEKHIDAYLPVRVNEQRVSNLLQSLLVAASVCAMPAIKLIPTSVLWGYFSYMAIDSLPGNQFWERMLLLFITPTRRYKVLEHVHASFVESVPYRFMAMFTLFQFIYLLICFGVTWIPIAGILFP

SEQ ID NO: 111755 - protein, 86 aa, Gossypium hirsutum
  Clone ID: uC-gsronu33B114c01b1.pep
LSSAHASGERLGCLVEQGPRGAAGLGTGTVVAAAAVIAEAPLSAPADPPASPCPSFAFFHPFSLASPFGLFYGLSDLCFFRLHLPP

SEQ ID NO: 111756 - protein, 52 aa, Gossypium hirsutum
  Clone ID: uC-gsronu33B114c08b1.pep
IEKAMEDRLMGGFIITLLVLALTVVVGFLFFPLGFQKTQTPKIDSKKKYFAL

SEQ ID NO: 111757 - protein, 133 aa, Gossypium hirsutum
  Clone ID: uC-gsronu33B114d09b1.pep
VLEELQSDAKEMAEKILEYRATIPDQLKTTLDSILSAQRPDLPGIDDGSDPGPSAQNNADSKEMKSDDEQRAEEKIRSLKGKISSNISAMPVVLKRMKVCISRIEKLESCNGIIHPALKKRKLVDPMKLYFHN

SEQ ID NO: 111758 - protein, 54 aa, Gossypium hirsutum
  Clone ID: uC-gsronu33B114e08b1.pep
SSRPEEDKEFVKICMSSIKKGDKGMDLLQEILQHLRDLRAVELRTRTLCGDVQG

SEQ ID NO: 111759 - protein, 106 aa, Gossypium hirsutum
  unsure (1)..(106): unsure at all Xaa locations
  Clone ID: uC-gsronu33B114f11b1.pep
PSRPPTRPQTGGFTQKFFFAFNAAKHIFDGHVGMKSNRTNTIPEQLLENVPVIGDAXEAEESAEVGTKPLRQHSYDXPRQTLLETEKPEGDPAGGKYPNMLRVIVK

SEQ ID NO: 111760 - protein, 77 aa, Gossypium hirsutum
  Clone ID: uC-gsronu33B114f12b1.pep
SMLPGSSRALWFSAGMLLAASFHSGVQRVIHWGPNNGGTPGGRPEGPPLICCANGVGKESFFNRTRSTWVFGIRQAR

SEQ ID NO: 111761 - protein, 159 aa, Gossypium hirsutum
  Clone ID: uC-gsronu33B114g01b1.pep
HASGLHDNSRLRGFPTITLDLTGSPSSSSSLNYFNRFPTNCPATPRFPSTNLNFSSPLVSNESFTQENYFYQQSLTDTLTKAITSDPSFRSLISAAISSLVGHSSAKHGDGTDQKGDSFSQNLMQAAINSQSLNDSSLRGSSYFKGFESSSSRIGSSNQ

SEQ ID NO: 111762 - protein, 128 aa, Gossypium hirsutum
  Clone ID: uC-gsronu33B116a05b1.pep
MPADSGDRRQVAVPGTMASHPPPKLTEPLPCPRCDSTNTKFCYYNNYNLSQPRYFCKACRRYWTQGGTLRNVPVGGGTRKASKRSRCSSGSSPSVAVSSSSSVTHEAESAPMVVNPTPPMPGLGIKPE

SEQ ID NO: 111763 - protein, 155 aa, Gossypium hirsutum
  Clone ID: uC-gsronu33B116a06b1.pep
PLVRQSCKESTDNSKDASCVAESQDTGSSTTSSSRMVAQDLNDGYQVTEALRAQMEVQRRLHEQLEVQHRLQLRIEAQSKYLQSMLEKACKALTDQDQAASTGLEAAREELSELAIKVSNDCQGMIPPHDKIKLPSLSELAVVLENNRTSNMPGR

SEQ ID NO: 111764 - protein, 62 aa, Gossypium hirsutum
  Clone ID: uC-gsronu33B116a08b1.pep
YDAKDQKENRVIYPFFPLIMTKKKGLPSSNCLNKLMLCIWQRNLCWITPALQAIPFFSQHAK

SEQ ID NO: 111765 - protein, 69 aa, Gossypium hirsutum
  Clone ID: uC-gsronu33B116b02b1.pep
KWGFRRAHSELERETWEYFRTRRTAMKEEGTQIISVISSQLDALTGSSLGKRVFKLPKPLHYNSQTPTL

SEQ ID NO: 111766 - protein, 150 aa, Gossypium hirsutum
  Clone ID: uC-gsronu33B116c05b1.pep
LSFATFFRFNLGWRRWKSVAASESFKLACSRIPSREPWFFMVDPNLNQSVVFDSAERSWKKLSHPPLLSQNCNCNSIPVAAVGGLVCFRNMSGDYFVCNPVTGSCRELPPVNPDSHHRSLHAIAMNAYSNYHGSYKLFLVSGDLPKLSYK

SEQ ID NO: 111767 - protein, 74 aa, Gossypium hirsutum
  Clone ID: uC-gsronu33B116d07b1.pep
VSWEKIDVSFQSSRQRFAAHSVIQVLSLSGVDKSLYDHICSRKFLLSEVLQVKDEVMHIEGADVIQHMIDHFLT

SEQ ID NO: 111768 - protein, 146 aa, Gossypium hirsutum
  unsure (1)..(146): unsure at all Xaa locations
  Clone ID: uC-gsronu33B116e12b1.pep
DFGSKDMLECVGENYVIGXGGAGIVYRGIMPNGEQVAVKKLLGISKGSSHDNGLSAEIQTLGKIRHRNIVRLLGFCSNKEINLLIYEYMPNGSLGEVLHGKGGGYLRWDTRLKIAIEAAKGLCYLHHDXSPLILHRDVKSNNILLN

SEQ ID NO: 111769 - protein, 124 aa, Gossypium hirsutum
  unsure (1)..(124): unsure at all Xaa locations
  Clone ID: uC-gsronu33B116f11b1.pep
SLHPPRVLTRLHFDGLCGDKTPVCSIGGXRPSKSRDKLQNDGSRVIKKCLSRRQNVASGSRDGIYYVLLDATKQQXYVGACEKSGFKSVDYMLWAYKPLKGKHVAFTGYMTIEEADKLIRSVSN

SEQ ID NO: 111770 - protein, 152 aa, Gossypium hirsutum
  Clone ID: uC-gsronu33B116g07b1.pep
IPLDLSSSMGNPVNLEDSRGNISQVSLNNNVIQNIDYTTKQQWGDSRHDYNGNMNNSFSRGDSLVPASGPMMDQSNLISDKMNDVSLFSQFSGDSTYVVPHLDGEKSAFDTKPRSNEDFLFETKPQNGFNQNSFEPLENIMMSMIKSDQNNE

SEQ ID NO: 111771 - protein, 66 aa, Gossypium hirsutum
  Clone ID: uC-gsronu33B116g12b1.pep
LMIVVQIERSRIEKVQKEAEVVRNDLRDLHLENKKLRGTIKNSGLGKSSTDWKEEISNIQGGMEFW

SEQ ID NO: 111772 - protein, 66 aa, Gossypium hirsutum
  unsure (1)..(66): unsure at all Xaa locations
  Clone ID: uC-gsronu33B116h04b1.pep
VPELEFCXNHKTKCIFLKGKKNSKASQLWELQFLPTSHIIENYLGLHLHYMYLAVDDVPWDYFGRN

SEQ ID NO: 111773 - protein, 101 aa, Gossypium hirsutum
  unsure (1)..(101): unsure at all Xaa locations
  Clone ID: uC-gsronu33B116h11b1.pep
SLAFSGALYFQGKVIVNQGICVPDEIIIDLLSKRXLEAREANGESWFILDGLSRTVRQAEILKGVTDIDLLINLKLSEEALFAXWIVRRSSLACGGNYDVG

SEQ ID NO: 111774 - protein, 170 aa, Gossypium hirsutum
  Clone ID: uC-gsronu33B117a10b1.pep
VIDSGDGVTHVVPVVDGFSFPHLTKRMNVAGRHITSYLVDLLSRRGYAMNRTADFETVREIKEKLCYISYDYKREYQLGLETTILVKNYTLPDGRVIKVGTERFQAPEALFTPELIDVEGDGMADMVFRCIQEMDIDNRMMLYQHIVLSGGSTMYPGLPSRLEREILERY

SEQ ID NO: 111775 - protein, 58 aa, Gossypium hirsutum
  unsure (1)..(58): unsure at all Xaa locations
  Clone ID: uC-gsronu33B117b06b1.pep
SKKLFIVPSLXVWHIKVNTVQKKKRKRHSMPHHLTQLTEPTLPKFSKSKPSFPSLLPR

SEQ ID NO: 111776 - protein, 60 aa, Gossypium hirsutum
  Clone ID: uC-gsronu33B117c05b1.pep
HSFGRRNAPLTAENAMRVREAMRGVAFAGLTPDWANQIPEDRWIDQLRRLRQPQRPSSTV

SEQ ID NO: 111777 - protein, 46 aa, Gossypium hirsutum
  Clone ID: uC-gsronu33B117c11b1.pep
YIFFFFFFLGSFCFFIFFFFFFFCLCFFFFFFFFFLKKMIIAIMQS

SEQ ID NO: 111778 - protein, 38 aa, Gossypium hirsutum
  Clone ID: uC-gsronu33B117d09b1.pep
ANNLLVSSYVFCIWLIISSVDSEVLNTKFCPWMLCLAT

SEQ ID NO: 111779 - protein, 51 aa, Gossypium hirsutum
  Clone ID: uC-gsronu33B117e02b1.pep
AVIANNIIHCLTIDTVTSTAQHGTGRVVSGCDFKTNPKHHAWKRSGRRITA

SEQ ID NO: 111780 - protein, 46 aa, Gossypium hirsutum
  Clone ID: uC-gsronu33B117f02b1.pep
TAAPFFFFFFFFFFCFFFFFFFFFFFFFFFFFFFFFFFFFKQKKCN

SEQ ID NO: 111781 - protein, 66 aa, Gossypium hirsutum
  Clone ID: uC-gsronu33B117f05b1.pep
AWIGWQVISRSESIKLSWLAHDCMLDWHAQFKLTVKNEGFSVGGLQLNLFTPSGYCSMVAIRSFLE

SEQ ID NO: 111782 - protein, 79 aa, Gossypium hirsutum
  Clone ID: uC-gsronu33B117g12b1.pep
KKHGSQLILWIENMAKLMCVTTSLHQRMVISYRPGSNLKVKGKDYPGSVLDCLPQCMPLDGTRKRYNTAIVDYNSDYCG

SEQ ID NO: 111783 - protein, 54 aa, Gossypium hirsutum
  Clone ID: uC-gsronu33B121a06b1.pep
AVQALDYPETEWRRGGGQFELRRRFFTARNNRTVSSLQGRPASSGKNTTAPKQN

SEQ ID NO: 111784 - protein, 29 aa, Gossypium hirsutum
  Clone ID: uC-gsronu33B121a08b1.pep
EKGTLVLKFKLKLSTHYAPSANVLFDVLI

SEQ ID NO: 111785 - protein, 47 aa, Gossypium hirsutum
  Clone ID: uC-gsronu33B121a11b1.pep
FRYFPFRPSAVSDVSKLQERIAMVKIRLSDRVHEIQDLKIAVFVALQ

SEQ ID NO: 111786 - protein, 39 aa, Gossypium hirsutum
  Clone ID: uC-gsronu33B121c01b1.pep
IFLKERGLGIANTVSASASATTLASSSKSDPHGKRPMKS

SEQ ID NO: 111787 - protein, 56 aa, Gossypium hirsutum
  Clone ID: uC-gsronu33B121c03b1.pep
DNFNFFAIEKELKLDEGYQKTYKNVDELLPTLPRSKGWWLDQLFQYQGFWFSSYSV

SEQ ID NO: 111788 - protein, 45 aa, Gossypium hirsutum
  Clone ID: uC-gsronu33B121c06b1.pep
SSSVFANSALRLASMLSDDESANTFITESKELLSHIHKYSTWIFF

SEQ ID NO: 111789 - protein, 43 aa, Gossypium hirsutum
  Clone ID: uC-gsronu33B121c09b1.pep
EDEIVEKRSNAALKQDQTQSCFFTDLWQPFHNILILIACSYGY

SEQ ID NO: 111790 - protein, 49 aa, Gossypium hirsutum
  Clone ID: uC-gsronu33B121e08b1.pep
CLVIHSIYIQPKTPNATYSVPDHATNTPTISSFIQATLHRVMWYCWSLS

SEQ ID NO: 111791 - protein, 27 aa, Gossypium hirsutum
  Clone ID: uC-gsronu33B121f06b1.pep
PISSPAGLIIGHLAPLRRATSTSHKLG

SEQ ID NO: 111792 - protein, 54 aa, Gossypium hirsutum
  Clone ID: uC-gsronu33B121g01b1.pep
PPSPIHRSIDPVCVGHLQLASSSAQLLHFCFFICSLGSPFSVLPKVWSLLLRPH

SEQ ID NO: 111793 - protein, 64 aa, Gossypium hirsutum
  Clone ID: uC-gsronu33B121g03b1.pep
GGKYRRPTGGGPTNSREQCQGEALSWPLPMEARKAREDKRSKKEANGFICCFSLIEERPKEQLA

SEQ ID NO: 111794 - protein, 40 aa, Gossypium hirsutum
  Clone ID: uC-gsronu33B121h03b1.pep
KTRIGEIRKNAFGSDRFAVDWQSFITDLPKLGAVFVAQIK

SEQ ID NO: 111795 - protein, 108 aa, Gossypium hirsutum
  Clone ID: uC-gsronu33B124a02b1.pep
IMGYFSKVEKNPLNFLCQIIFKIIPQMCYSVSIIRFKISCQSIIVSRSRSSARRSTSGMVSVTSFKSFLILSIATFKAYPSVSTESTECNSDLNLTSPRSTSTLMMSE

SEQ ID NO: 111796 - protein, 95 aa, Gossypium hirsutum
  Clone ID: uC-gsronu33B124a04b1.pep
PRDVWWYSKHLILSSLCPLPPFPPFPNCYPRFAPNLLLIPQHTLPPSTNSPIKPNPLCHHLSSTSQDTEFDHPKIKKSNTHFHFHQQNISGSLLK

SEQ ID NO: 111797 - protein, 109 aa, Gossypium hirsutum
  Clone ID: uC-gsronu33B124b11b1.pep
MAIRKSSKLPQTAVLKQILKRCSSLGKKQHGGGYDDVGLTPPLDVPKGHFAVYVGENRSRYIVPISFLTHPEFQCLLRRAEEEFGFDHDMGLTIPCEEVVFRSLTSTLR

SEQ ID NO: 111798 - protein, 159 aa, Gossypium hirsutum
  Clone ID: uC-gsronu33B124c08b1.pep
PTRPETVSLDGPISTRTAQTCQSPLVPHEFVCPIMLEIMTDPVIVATGQTYERDSIRKWLNSNHRTCPKTGQTLEHLSLAPNFALRNLILQWCEKNNLELPKKDNYASSVNYSAEIMEEMSSLVLNLSSSQPNVRRDAIVKIRMLSKENPENRIFIAND

SEQ ID NO: 111799 - protein, 80 aa, Gossypium hirsutum
  Clone ID: uC-gsronu33B124d04b1.pep
MMRRQQRNQCQQSRFFYELLALVLNLLRLPTMPLPFSDQPAAPERIPLTRTASMTTIPTAGFAWLMLGISISLMLCGSVT

SEQ ID NO: 111800 - protein, 93 aa, Gossypium hirsutum
  Clone ID: uC-gsronu33B124d12b1.pep
ISKWDCVLVLGSNLKFCLVDHYICWLMNPFHLLVSYMNRILVADYHDNGSILNRYYQHIYVTMYGPKNAVGTIKMDMNFITFQMLTAKKLSRK

SEQ ID NO: 111801 - protein, 98 aa, Gossypium hirsutum
  Clone ID: uC-gsronu33B124e03b1.pep
LLFLWETTVSIISILVLPSNLIISQRLSEILPITLFVVLKLADDFETELVEVTIVLELCNYLFFHNLLVFFSHRFLCIQSLQFGKERNVGEDEVEGRK

SEQ ID NO: 111802 - protein, 42 aa, Gossypium hirsutum
  Clone ID: uC-gsronu33B124f02b1.pep
NWSWSCIYLNSHPRYNDKQLVLPLSKSCIYDTSRYGSLKDPI

SEQ ID NO: 111803 - protein, 66 aa, Gossypium hirsutum
  Clone ID: uC-gsronu33B124f08b1.pep
FHSPHGWELMIGSIYKDFGFAHNDQIISGLVSTFPVILDTIFKYWIFRYLNRVSPSLVVIYHSMND

SEQ ID NO: 111804 - protein, 156 aa, Gossypium hirsutum
  Clone ID: uC-gsronu33B124g12b1.pep
MAMIPSLFGGRRSSVLDPFALDVWDPFKDFPFPSSLTTGSPETSAFVNARMDWKETPEAHVFKADLPGLKKEEVKVEVEDDRVLQISGERKIEKEDKNDTWHRVERSSGKFSRRFRLPENVKMDQVKASMENGVLTVTVPKVEVKKPDVKAIEISG

SEQ ID NO: 111805 - protein, 82 aa, Gossypium hirsutum
  Clone ID: uC-gsronu33B125a02b1.pep
LHLSRELGMSRSLSLHILCTRKHLCLRLRQLEVARKLRPTLCLWLIVHGNRLRFWHRPGIPKLGWSPKALWYVSVIHPKSPT

SEQ ID NO: 111806 - protein, 43 aa, Gossypium hirsutum
  Clone ID: uC-gsronu33B125a05b1.pep
SCFRFLCPFHLRKTLLSKVKHCAPLAPELAREAFAVPPGASQA

SEQ ID NO: 111807 - protein, 106 aa, Gossypium hirsutum
  unsure (1)..(106): unsure at all Xaa locations
  Clone ID: uC-gsronu33B125b04b1.pep
MGFWGIVRKPAKPHPYHSDNVRGKLNITQATLGLGSFKERSVLQXSVGHKSSIILCSLLPTQNETCALYLKFDEDDDLADFSVLGPQSIHLSGYFEAGHRDHLRDE

SEQ ID NO: 111808 - protein, 121 aa, Gossypium hirsutum
  unsure (1)..(121): unsure at all Xaa locations
  Clone ID: uC-gsronu33B125c05b1.pep
PRVRPRVRPAHLMYDGEDPRLFEHFSAVAQRLGVYTADDYADILEALIKRWGLEKMEGLTGEGRRAHDFVCGLAPWIRKLQERAEDRAXRRMDPXGVKYTLMFNRETMLWLFMYQTCAWIV

SEQ ID NO: 111809 - protein, 53 aa, Gossypium hirsutum
  Clone ID: uC-gsronu33B125d12b1.pep
WKSPFATKPTKLNNVAVLPWFDASSFIAILKKVYCDSLIKFDQLYSINSCLGY

SEQ ID NO: 111810 - protein, 56 aa, Gossypium hirsutum
  Clone ID: uC-gsronu33B125e04b1.pep
PTRSWTRGSHGWSVRRRTLVGMTWRRLRSSAEVAGVCCRPRVDSIAAFETYSLFLY

SEQ ID NO: 111811 - protein, 57 aa, Gossypium hirsutum
  Clone ID: uC-gsronu33B125f07b1.pep
STFLQIQKEIQLNIEAETFNAVLTCHHNSTKLLHHPQSHPMHMHYVIQDTKKIMFSL

SEQ ID NO: 111812 - protein, 78 aa, Gossypium hirsutum
  Clone ID: uC-gsronu33B125f09b1.pep
YSSSIVRSLPLFREPICSLSWRSTRQHGFGRSSQGFLDPCLQMMRWPRRTPAKALYSAFSQLCCQTLARLAPVEEFYK

SEQ ID NO: 111813 - protein, 43 aa, Gossypium hirsutum
  Clone ID: uC-gsronu33B125g03b1.pep
LKPETHVEWIIFFSQNLKESSVQTLKDLTQSDLPFKRPNYETA

SEQ ID NO: 111814 - protein, 54 aa, Gossypium hirsutum
  Clone ID: uC-gsronu33B125g04b1.pep
PTRSWSFRLFSFSHFRELRCGTLGKKEQIVVWFFFWGVQGLDLLWSGRGYSVLV

SEQ ID NO: 111815 - protein, 105 aa, Gossypium hirsutum
  unsure (1)..(105): unsure at all Xaa locations
  Clone ID: uC-gsronu33B125g05b1.pep
IEYAKKHNVPGPVTKKSIYSRDRNLWHLSHEGDILEDPANEPKEDMYMMSVDPKDAPDKPQYVKIGIESRIPVSLDGKTYSPAELVATLNEXGGKHGMGRIDMVE

SEQ ID NO: 111816 - protein, 171 aa, Gossypium hirsutum
  Clone ID: uC-gsronu33B125h03b1.pep
VFGKLNRLVIPGQHAEKCWPLDSSSIEKGLLLNFEDRNGKTWRFRHSYWNTSQSYVMTHGWSRFLKEKKLGHGDTVSFQRGVGELVKARLYIDWKLRPNALDPLPLAHMELRNQFNLLQPLRREPICMSRNYEPLHGLNYSIDRYNHRHDHHCQHQHQQQAVTYSSLSHHY

SEQ ID NO: 111817 - protein, 87 aa, Gossypium hirsutum
  Clone ID: uC-gsronu33B125h04b1.pep
SRSRTVWTPTPISSIETAAESLFHISIDVSSSPDLAASHTLPGQYLQLRLLDVEKPSFLAIASPPSLAASSGAFESLVNSVAGSTAE

SEQ ID NO: 111818 - protein, 42 aa, Gossypium hirsutum
  Clone ID: uC-gsronu33B125h07b1.pep
NQFPTKIRLELNWTAQLTDLQESLQIAWRWQKAHRDGYAAAS

SEQ ID NO: 111819 - protein, 73 aa, Gossypium hirsutum
  Clone ID: uC-gsronu33B125h12b1.pep
KAVNRKRKEKRTRKRRKKLFIVICGATKRASAHKLLNRCNLPEVQRSRVTIMCPNVASQFKLQTSIISPIATT

SEQ ID NO: 111820 - protein, 99 aa, Gossypium hirsutum
  Clone ID: uC-gsronu33B126a01b1.pep
IQGSQLFFLMILDYHMEAWTFSVTAIKHSSIASSSHTIHVWCMSFSNTPCMVYELFQYPMYGTGPLRSWLRPFSSLAHLIKQNHKSLRREKRFNSQIKI

SEQ ID NO: 111821 - protein, 39 aa, Gossypium hirsutum
  Clone ID: uC-gsronu33B126a05b1.pep
TYWRSIESPNFNDWPLIYNGEIGKTPDFPNLISLQPSPF

SEQ ID NO: 111822 - protein, 71 aa, Gossypium hirsutum
  Clone ID: uC-gsronu33B126b04b1.pep
VSRYVSVIPIVRAALFNIYFSRRSFFFFLSCHSFFLYFISPRFLGAQRRAMHVMTALLVPCALTDHGEREA

SEQ ID NO: 111823 - protein, 59 aa, Gossypium hirsutum
  unsure (1)..(59): unsure at all Xaa locations
  Clone ID: uC-gsronu33B126c08b1.pep
XFNREKKRACLLPSYIIMIFTINSIHLHLKEGKSQNQTKKSTYKKAYGIIIITSEKLLL

SEQ ID NO: 111824 - protein, 87 aa, Gossypium hirsutum
  unsure (1)..(87): unsure at all Xaa locations
  Clone ID: uC-gsronu33B126d02b1.pep
EPQGPSPFFVDGNPKTGVIKAIRQPERVQTPSMKNPGGYVEFRTHSPGLAWHQLIMRLVIRNASLWGGKTLIFLKSPXCCRAFFGLY

SEQ ID NO: 111825 - protein, 169 aa, Gossypium hirsutum
  Clone ID: uC-gsronu33B126d08b1.pep
VVALFGLALYHGNRQRVIDAGTIPLLLHIIASSNKDELIVDSLALLATLAECLDGTLAILQASSFPLITRILQSTTSQAGKEHCVSIFLSCCTNGGDEAVAVLAKDTSVMSSLYSVTTDGTAQASKKARSLIKMLHKFHETSSSGQGVKHLRMNNQFMFGSIVKFICCM

SEQ ID NO: 111826 - protein, 49 aa, Gossypium hirsutum
  Clone ID: uC-gsronu33B126e02b1.pep
FASAAAEANMWGDPDAADIVFTSGADVLAVGINVTHQVILTDSDRETLL

SEQ ID NO: 111827 - protein, 133 aa, Gossypium hirsutum
  Clone ID: uC-gsronu33B126f10b1.pep
LPGFAPVVPQECSDCGKKFNMGGPIWSAPIHDQDWVTSILADVKSMKNCYPAYERISAVLTTISEELPDVPLFLSLHNLCATLKCTSPSAVIFRSAVINAGYQICGTHVNPLGLKSDAPMDVIWDIMRCWVKN

SEQ ID NO: 111828 - protein, 62 aa, Gossypium hirsutum
  Clone ID: uC-gsronu33B126g07b1.pep
PDPPLHAQIIATNVATFQSYVVHIQPHRAHIERNHCSGRNRLLSSNMSLSPPPQYHQVRVPN

SEQ ID NO: 111829 - protein, 76 aa, Gossypium hirsutum
  Clone ID: uC-gsronu33B126g10b1.pep
KLLAWDNSPLIRHGISDRLIPKHRIVKHLVSQPETIVTHVRVYRNIKLLKSTGVLTSNFSLLALLQPSIGFSRHSR

SEQ ID NO: 111830 - protein, 110 aa, Gossypium hirsutum
  unsure (1)..(110): unsure at all Xaa locations
  Clone ID: uC-gsronu33B126g11b1.pep
LRVRLKLRDIGYSNIRFVGVASYEFEVTYPIATVRRFXACVLEAAKICATDDPHAVKSVELVGDSSSGSHGKITXVEGLLYEYMKHQIGGHDENNFYYTYSMIEGGPFVD

SEQ ID NO: 111831 - protein, 104 aa, Gossypium hirsutum
  Clone ID: uC-gsronu33B126g12b1.pep
LPKILSRRYSLGSSVLMASKRILKELKDSLQDTPTSCIAGTGARDMLHWPATIMRPSDSFIAGCVFSVDIHFPPEYPFKTPKVAFWTEVFHSNTSRHGCMGFEI

SEQ ID NO: 111832 - protein, 78 aa, Gossypium hirsutum
  unsure (1)..(78): unsure at all Xaa locations
  Clone ID: uC-gsronu33B126h09b1.pep
LAVCMIFNSTGDTEVXEGIDHKFDLMNAKRAFVHXHDVEGMQEGEYSDAREELGALEXDHDERGAQSGERDERDEEEY

SEQ ID NO: 111833 - protein, 148 aa, Gossypium hirsutum
  Clone ID: uC-gsronu33B127a07b1.pep
FFSLFLFLSFPAIFPRSLIGNSRDMVQLKEFRIVMPMSLEEYQVAQMYMAMKMQQQSTNGDEGVEVLENKRFQDDVFGKGQFTSKVYRLQSKAPAWLTTIAPKDALVMQDEAWNAYPRCKTVIKCPYFTKFSLTIETVHRADNGTSEN

SEQ ID NO: 111834 - protein, 78 aa, Gossypium hirsutum
  Clone ID: uC-gsronu33B127b01b1.pep
MANTRPDSRHAVISTYWYLYLSYLQIPCYGFAVAKSRLDNHTCVTPGRGSCTRGPMLATQNDPDAIGGTIPPAYRTMP

SEQ ID NO: 111835 - protein, 79 aa, Gossypium hirsutum
  Clone ID: uC-gsronu33B127d03b1.pep
TPKKAPPIIFFLFKLAQTSLFYWLVFVYFLFIFIFFFFYIIKFFFCFFFNRQVLPQSLCLKKDWKTTLALCLSYMTVST

SEQ ID NO: 111836 - protein, 136 aa, Gossypium hirsutum
  Clone ID: uC-gsronu33B127d12b1.pep
YAWADAWADAWAAFFSVWKRYGFTPEGFNLATLSVQHGQKSYPLRPELIESTYWLYKATRNPRYLDAGRDIVASLQYGARCPCGYCHISDVEFHKREDHMESFFLAETVKYLWLLFDLAVGPDNLCENGPYKYIFS

SEQ ID NO: 111837 - protein, 91 aa, Gossypium hirsutum
  Clone ID: uC-gsronu33B127f01b1.pep
NQMGKLTAKSHYESLRNARIVDNPALLASLGVHKTMFDLRSMLYLKNLRFAHGITRIACSRTIPGILVSRQPLFHHVSAAEVCTDTTGLWE

SEQ ID NO: 111838 - protein, 107 aa, Gossypium hirsutum
  Clone ID: uC-gsronu33B127f02b1.pep
PIRPEEVLVIEKIEFDRHQVVKFDVYINDEDDTVIGPDNTEFAGSFVNVPHKHKHGKKMATFLRLGLTDLLEELDAEDDDGVVVTLVPKFGKGLAKIGGIKIEFGRD

SEQ ID NO: 111839 - protein, 76 aa, Gossypium hirsutum
  Clone ID: uC-gsronu33B127f12b1.pep
LFRQYPGPWQGMLKQADGSYACVAESSTRFTLGETKEELLRVLGLQEEQGSQLEFLRRGYKVFIYSIFSFTLPCFV

SEQ ID NO: 111840 - protein, 57 aa, Gossypium hirsutum
  Clone ID: uC-gsronu33B127g03b1.pep
NLPIGCSPPYLTIIHGSDMADYEPLTRCLTWLNQSLYGIERTGSKKGQTHGMAETMK

SEQ ID NO: 111841 - protein, 173 aa, Gossypium hirsutum
  Clone ID: uC-gsronu33B129b05b1.pep
RGCNCKRSSCLKKYCECFQAGVGCSLSCRCEGCKNSFGRKDGGCESESDGDNLEACEKNASEKSSHDTVISKGQEHPNLSVPSPDISRLPFAYTGKLAAFFPHSIKSSPQLCSTQEQGSSDTSSCKPKLESNLDGIPENGTPEIPKHKCFTLVSNPTSPNCKRVFSTPNHDST

SEQ ID NO: 111842 - protein, 124 aa, Gossypium hirsutum
  Clone ID: uC-gsronu33B129c03b1.pep
YPNFVNRSRMGSSTAFPSSRFIASERPSFLPRRSSCFSSFTSPTSFVSYRRSSNSRILHISASLLHSNVDVSWFPPDPNSLPNNYGGWAVVQAPLTPKTNKKGLSSIFVGSLIGSSLAIAISIS

SEQ ID NO: 111843 - protein, 57 aa, Gossypium hirsutum
  Clone ID: uC-gsronu33B129c09b1.pep
DTSKFEDFVDKNLRGEFSESMASKLGKIALNCTNEEPNDRPSMETIIKELNDYSVSS

SEQ ID NO: 111844 - protein, 183 aa, Gossypium hirsutum
  unsure (1)..(183): unsure at all Xaa locations
  Clone ID: uC-gsronu33B129c12b1.pep
FYNRNDINRILGAKASCIXFKDSACRCFGYMVSKKKYIFTIDDDCFVANDPSGKAINALEQHIKNLLSPSTPFFFNTLYDPFRDGADFVRGYPFSLREGVPTAVSHGLWLNIPDYDAPTQLVKPLERNTRFVDAVLTIPKGTLFPMCGMNLAFDRELIGPAMYFGLMGDGQPXIGRYDDMWAW

SEQ ID NO: 111845 - protein, 119 aa, Gossypium hirsutum
  Clone ID: uC-gsronu33B129d03b1.pep
QVKVSLGGNPPPPRLNMPRKGGFPFPFKFCTFFKKGYGGAFFYFYKLWKKGYVPKRFFFWVTTVFSHSTLCKTAHCILFLCHYIKDISSRMRVCELLYPIERATFFFFFFFFFFFFYFF

SEQ ID NO: 111846 - protein, 81 aa, Gossypium hirsutum
  Clone ID: uC-gsronu33B129f01b1.pep
FIYNIPIVAEQMAIAVHLRTTMHVDLASCFANFGFTALYLIVLNRQKNRYWIRTIMIQISKSLAIHIIESTVPFSISHNII

SEQ ID NO: 111847 - protein, 145 aa, Gossypium hirsutum
  Clone ID: uC-gsronu33B129f02b1.pep
HSIAEVLEDFNGEEENQLEIVPADVEAHGHGFIEHSMAELLDDLQDNTSLLRGNFKMHSRARGKRVQAALKRSICSLGDRTIESEDLNEPFSGGSSSNDEADYQNLKLATPKIKKPTISDKFQEALGATFLTVEASLFLDQEHSL

SEQ ID NO: 111848 - protein, 45 aa, Gossypium hirsutum
  Clone ID: uC-gsronu33B129f03b1.pep
ALNIMLQVHLLMVSYTLTKCVSSPLGLIRPLRSIKDSFSHFIECK

SEQ ID NO: 111849 - protein, 62 aa, Gossypium hirsutum
  Clone ID: uC-gsronu33B129f05b1.pep
NKGFIRRVKVIGTISRTITHIEYLKRDCQNLFSHNCHTQCLTFQILFLQLFMSSLITYYSFH

SEQ ID NO: 111850 - protein, 158 aa, Gossypium hirsutum
  Clone ID: uC-gsronu33B129f07b1.pep
MAATASSPWGKPGAWSVDAEENEAEVERQQSGAGSSTEKLGDFPSLATAVTTTKANKKKGQTLSLSEFASKPSEPARLTREDLLALPTGPRQRSAEELDRNRLGGGFKSYGSNRYGSDGDDSSSNSRWGLNKDRETASSRADEIDDWASAKKSTSAAN

SEQ ID NO: 111851 - protein, 96 aa, Gossypium hirsutum
  Clone ID: uC-gsronu33B129g05b1.pep
REIKRGLPIVLNDFIAGQEVGNVPFVVENGCGKFSKSPKEIANIISQWFGPKADELKSMSENALRLARPEAVFKIVHDLHQLVRQRNFVPQFSCTT

SEQ ID NO: 111852 - protein, 83 aa, Gossypium hirsutum
  unsure (1)..(83): unsure at all Xaa locations
  Clone ID: uC-gsronu33B129g08b1.pep
PPPPPPLQIPLLLLLLLRFPLPLXVFAVLRPRLDSGSDLRVCIQVVAAVFLGPVEVPTLFSGVLSQRSLTLPFWPWRNSKICK

SEQ ID NO: 111853 - protein, 87 aa, Gossypium hirsutum
  unsure (1)..(87): unsure at all Xaa locations
  Clone ID: uC-gsronu33B134a09b1.pep
RLTRPIKSHAMGVASSNNDHTKVELVEPPKSVKVGERVTFSGFTGXPDDVLNPKKKGWETLQVDLHSGAYLGACYKDITLTTSAVIC

SEQ ID NO: 111854 - protein, 58 aa, Gossypium hirsutum
  Clone ID: uC-gsronu33B134a12b1.pep
MDSEQYYAREWRTVPGASTPETLNGNFNCNICLDFAHEPIVTLCGHLYCWPCIYKWLH

SEQ ID NO: 111855 - protein, 50 aa, Gossypium hirsutum
  Clone ID: uC-gsronu33B134b05b1.pep
EEILNDVHEQVCFCQHFISFSVKIYSYKELLQFNLIISFPFPGKFVLFCL

SEQ ID NO: 111856 - protein, 51 aa, Gossypium hirsutum
  Clone ID: uC-gsronu33B134b06b1.pep
AYSLDSCLVGWDFLPIITLFHSKHQRTIIFFLSTTRSMTHKIANMKVVSKL

SEQ ID NO: 111857 - protein, 112 aa, Gossypium hirsutum
  unsure (1)..(112): unsure at all Xaa locations
  Clone ID: uC-gsronu33B134b10b1.pep
MAGSIAIPTVEEAGGKAHRQRLAPRDGRXCDPTTGGVRKTHLYHTGTVALLKTGQDQTRPDRPMRXKTHQSLGLERAQHXMTVGTYQSLAGPALQEAADAYLEGLPEDTNTC

SEQ ID NO: 111858 - protein, 86 aa, Gossypium hirsutum
  Clone ID: uC-gsronu33B134b12b1.pep
IRERHTVLGGGFLIVHVGYYTQAAICAGAEDDMIVANNVTFGPVMAVMTRKTMVEGSLRADNTTYGVAAGVITHDSYVANTVLRSV

SEQ ID NO: 111859 - protein, 92 aa, Gossypium hirsutum
  Clone ID: uC-gsronu33B134c01b1.pep
MDTYSSGEELVLKTRKPYTITKQRERWTEEEHNRFLEALKLYGRAWQRIEEHIGTKTAVQIRSHAQKFFSKLEKEALAKGVPIGQALDIDIL

SEQ ID NO: 111860 - protein, 47 aa, Gossypium hirsutum
  Clone ID: uC-gsronu33B134c02b1.pep
ENNIIETFVLGLGMAKRGNYEEHQSKLLKQVQKFNNATIPKCSFLKL

SEQ ID NO: 111861 - protein, 146 aa, Gossypium hirsutum
  unsure (1)..(146): unsure at all Xaa locations
  Clone ID: uC-gsronu33B134c03b1.pep
GCLENHLFRRTIPLPWSNRIKIALGAAKGLAFLHGGPEPVIYRDFKTSNILLDSEYNAKLSDFGLAKAGPQGDKTHVSTRVVGTYGYAAPEYVMTGHLTSKSDVYSFGVVLLEILTGRRSMDKKRPSGEQNLVTWARPYXADRRKL

SEQ ID NO: 111862 - protein, 58 aa, Gossypium hirsutum
  Clone ID: uC-gsronu33B134e07b1.pep
LNVTVITENGYKDQTDPAKNTVDPDCRGVGILGIAWAFGGMIFIVVYCIARISGGHIN

SEQ ID NO: 111863 - protein, 61 aa, Gossypium hirsutum
  Clone ID: uC-gsronu33B134e12b1.pep
SFSYLATIKLDLDPRRWAGVTSQLGSYMSSSPLDSDGCSATYHKLCCQHLSLCVMMRARKQ

SEQ ID NO: 111864 - protein, 58 aa, Gossypium hirsutum
  Clone ID: uC-gsronu33B134f07b1.pep
NSTSKTMPLNPPWITLKDQRNRLICKWRRRLRRRGIELFATVERNADRGALQINNFFC

SEQ ID NO: 111865 - protein, 65 aa, Gossypium hirsutum
  Clone ID: uC-gsronu33B134g02b1.pep
SFRAPHTTLIDQYIMHSHLVLPVRSYQNFLRINVQPHAICCVWHAQSSHVYAKMAMLNNNHLNIY

SEQ ID NO: 111866 - protein, 72 aa, Gossypium hirsutum
  Clone ID: uC-gsronu33B134g08b1.pep
KKAFKGSILSMCLDQRILLLILWPLTVNRGIEKIAWKEKFYISSLQPWVKADQENLTEGWLLLSCPLTINDL

SEQ ID NO: 111867 - protein, 55 aa, Gossypium hirsutum
  Clone ID: uC-gsronu33B134h02b1.pep
PKVPSSINRAQLFSWNLRYRHMKFRYISVFGPYYVFNGSTPRYTECKPLRVLVPR

SEQ ID NO: 111868 - protein, 51 aa, Gossypium hirsutum
  Clone ID: uC-gsronu33B134h04b1.pep
CRSICRVSPTIFFGLHISSGIECEPRKGNTLSHYGCRRWFTQFHFWNPRCF

SEQ ID NO: 111869 - protein, 27 aa, Gossypium hirsutum
  Clone ID: uC-gsronu33B136b04b1.pep
FRFRAGLPAEFKHMNNNKVEKHMELSY

SEQ ID NO: 111870 - protein, 55 aa, Gossypium hirsutum
  Clone ID: uC-gsronu33B136c03b1.pep
LQITANTTRQVRQAAFCVGYTICKFFLSIKSRLSTTDDPSRQEAYAQKDLLIPQI

SEQ ID NO: 111871 - protein, 136 aa, Gossypium hirsutum
  unsure (1)..(136): unsure at all Xaa locations
  Clone ID: uC-gsronu33B136c12b1.pep
SVSSNILLSDNLEPLISDFGIRNIGCRKEKDKKDESDAEIDVYCFGVVLLELLTGXQGTEENVRRVRRLVKERKGVEALDSRLRFAGESEAEMVESLRVGYLCTAESAEKRPTMQQVLGLLKDIHPTVDDFNRFHW

SEQ ID NO: 111872 - protein, 129 aa, Gossypium hirsutum
  Clone ID: uC-gsronu33B136d06b1.pep
FFYDLRRVNPTIVVFVDNEVWMESGTPSFRKNFVNGLEFYAMMFESLDAAVVGNGEWVRKVETLLLRPRILAAVETAARSTAPPWRERFRGAGMRAVHLSQLAEFQAECLLGKVQGMGFHVAKRQTELV

SEQ ID NO: 111873 - protein, 114 aa, Gossypium hirsutum
  Clone ID: uC-gsronu33B136d08b1.pep
MSVLNRSYSYSKVNKEDPDEIIHRRAQFLIYKVLEQADSRRKPSFFRIKLCRLKLKIGRKLKKLKKTAMVSISGLRVDVYRQVFNQLKTWRRLFNRGGNDHGTIAAAIHRPLLT

SEQ ID NO: 111874 - protein, 60 aa, Gossypium hirsutum
  Clone ID: uC-gsronu33B136e01b1.pep
QYLYVYSFSSGPKIKWSKKFRYYMEVISYIELQISFPIRLEFHPHFFFFCQPTIPKGEPP

SEQ ID NO: 111875 - protein, 82 aa, Gossypium hirsutum
  Clone ID: uC-gsronu33B136e04b1.pep
IDKKFDHSRCSLSSRCSFRYISIFTGIAAEFKPWISCNPFINVCTSKGWDFNLLLLQSPNYCCLISWNCGPLLIIMHAGGNV

SEQ ID NO: 111876 - protein, 81 aa, Gossypium hirsutum
  Clone ID: uC-gsronu33B136f08b1.pep
TKHLSTSAKASHTDKVSMKPPDPDTKYLSQVLSVAEMLEWPDFNDQAWLFSSNEYQSKKKPKVGFPEIDETPRVWAEAFQI

SEQ ID NO: 111877 - protein, 58 aa, Gossypium hirsutum
  Clone ID: uC-gsronu33B136g08b1.pep
LLLSNVSFLLKLGGYFFGITPDSSTIWHEKVIGKYRCFWIYVISFFFLLVTASPVFGR

SEQ ID NO: 111878 - protein, 137 aa, Gossypium hirsutum
  unsure (1)..(137): unsure at all Xaa locations
  Clone ID: uC-gsronu33B136g09b1.pep
MREMVHIQGGQCGNQIGAKFWEVISDEHGIDPTGTYHGDSDLQLERINVYFNEATGGRYVPRAILMDLEPGTMDSVRAGPFGQLFRPDNFVXGQTGAGNNWAKGHYTEXAELIDSVLDVVRKEADGCDCLQXFQITH

SEQ ID NO: 111879 - protein, 79 aa, Gossypium hirsutum
  Clone ID: uC-gsronu33B136h01b1.pep
RFFLRTRGIGNRGALLDCLTIGGLGHASRCLRRLRAMEREMPTRLTMLKAGVNLCDLMVTHALLRPCIPYQRTWRSCTS

SEQ ID NO: 111880 - protein, 55 aa, Gossypium hirsutum
  Clone ID: uC-gsronu33B136h05b1.pep
RKTLLHGVQLKKLKRAAGRGLIIEMIASMLCQNEVFPGHKRALPLSYQISTQNTS

SEQ ID NO: 111881 - protein, 115 aa, Gossypium hirsutum
  Clone ID: uC-gsronu33B137a02b1.pep
FGCQTGAKKLDFCYPLQKLLSCMHALENLDLLYRPPFRLFFFFFFFFFFFFFFFFFFFFFFRTSQFLHLFQTGTNYTLCFFTNIVTFQLNFCFSILQLFLYLFMFMRTNLFQYLG

SEQ ID NO: 111882 - protein, 166 aa, Gossypium hirsutum
  unsure (1)..(166): unsure at all Xaa locations
  Clone ID: uC-gsronu33B137b04b1.pep
LSRPPTRPPDWGDDKKPSPEKIELDNSTQLDKPEDVNEPQVQGLGFDALDKGFEKEEPKQKGRKNRKKTNRKMQEWWKDDHLGEVGKKDSKLKQLKTKWKKGFKMPHFDLGRRFYFCRSKKFGEPNQDDCDANGEFSFRRGWRRKNNNSIGSDMWSXDLFSRELSS

SEQ ID NO: 111883 - protein, 88 aa, Gossypium hirsutum
  Clone ID: uC-gsronu33B137c08b1.pep
IPEIVAVEPVTDEETGLEMNEENIEKVLEEIRPYLVGAAGGSLELVAIEEPIVKVRITGPAAGVMTVRVAVTQKLREKIPAIAAVQLL

SEQ ID NO: 111884 - protein, 58 aa, Gossypium hirsutum
  Clone ID: uC-gsronu33B137c10b1.pep
LIHGSMIYVIGYLTVLLNSAQIFEKIFGDELSMDIIGSLECKYITIYLQIYYQGLLVD

SEQ ID NO: 111885 - protein, 29 aa, Gossypium hirsutum
  Clone ID: uC-gsronu33B137c11b1.pep
FFPGVAMWQFMPPAAVDTSQDHVLRPPVA

SEQ ID NO: 111886 - protein, 113 aa, Gossypium hirsutum
  unsure (1)..(113): unsure at all Xaa locations
  Clone ID: uC-gsronu33B137e05b1.pep
MCILVSHRYGNLKAANYTTAVLLTSLRSQQPPQEQKWCYRIVEISKNSRQNYRCQIHQITESLAYFQEATPQPETMPINIGSRSTRRKATTGFRFFRPSPWXYAWTQTRFVLP

SEQ ID NO: 111887 - protein, 48 aa, Gossypium hirsutum
  Clone ID: uC-gsronu33B137e08b1.pep
FTCMNREWEDDSYPYLSTMIFKFYDLFCFYFNVVLMHQKKEEGERHKG

SEQ ID NO: 111888 - protein, 80 aa, Gossypium hirsutum
  Clone ID: uC-gsronu33B137e12b1.pep
FFTRPGGEEESVDMDVESDEDDDDLLIPNVHVDEDLFKGLEELVGSGSNGVGIVPTFGDNFSSWSTGNSAAAGAAASGGC

SEQ ID NO: 111889 - protein, 38 aa, Gossypium hirsutum
  Clone ID: uC-gsronu33B137f03b1.pep
EFIQRFLLSYSDKFVVKTSIITLLLTLDNIVGSRCIIS

SEQ ID NO: 111890 - protein, 51 aa, Gossypium hirsutum
  Clone ID: uC-gsronu33B137f05b1.pep
PNDLTNFKFSSCKTFFSKKLNISQSSFFRSILAMGFTIRRNVITTVLEFMS

SEQ ID NO: 111891 - protein, 76 aa, Gossypium hirsutum
  Clone ID: uC-gsronu33B137g07b1.pep
MEETAAAEVEIETQNCSLQEEEDEGEKWGLDPLMKNGVFVGESTESTDELNKRFDEFIRKMKEELRVEARQQLVMV

SEQ ID NO: 111892 - protein, 48 aa, Gossypium hirsutum
  Clone ID: uC-gsronu33B137g08b1.pep
FFSRPGNCTDLNESCERWAALGECTKNREYMIGTAELPGYCRRSCKVC

SEQ ID NO: 111893 - protein, 167 aa, Gossypium hirsutum
  Clone ID: uC-gsronu33B138a03b1.pep
YIDKPDVHGWTPRELAEQHGHEEIKTMFESRKEMKTQSIMSIPEKAETRYLGRFTSEPVIRPVAPDGTDGSWSQSRQRRRTSNFHNSLFGIMSAANMEKDLLLSVHKPKGVKDCVVNSARVVISCPEKGQTIGKLVSLPGNSEELLEMGAKKFGIIGCKVVSKEELK

SEQ ID NO: 111894 - protein, 53 aa, Gossypium hirsutum
  Clone ID: uC-gsronu33B138b07b1.pep
HLVIYTFHGVIFVVIKGCLISLLKWFSLSFKLFIGSKYIISVSCHFGLGLFRV

SEQ ID NO: 111895 - protein, 80 aa, Gossypium hirsutum
  Clone ID: uC-gsronu33B138c08b1.pep
FQPASPSLIPSPSRRAAHHVVLARSTHDHPWRLCCLSIAPSGLVPSPAKQKKSKTKSRNTQSKDKRIETRNINSCNMIRL

SEQ ID NO: 111896 - protein, 51 aa, Gossypium hirsutum
  unsure (1)..(51): unsure at all Xaa locations
  Clone ID: uC-gsronu33B138c10b1.pep
KFVEVYAYDCSKFVSCLVIPHNPIPATDMGWGVTXLVRSPLGCNENVYPNH

SEQ ID NO: 111897 - protein, 105 aa, Gossypium hirsutum
  unsure (1)..(105): unsure at all Xaa locations
  Clone ID: uC-gsronu33B138e03b1.pep
MAGNTTGFFDMKIGGSPIAGMXMEVYSDWTPHTGYYLPALHTGEKGVRHEGKALHYKRYCFHREIPNCMRQRSDYSGGNGTGGXASTDPRXAGEYFMEKHTGPGI

SEQ ID NO: 111898 - protein, 133 aa, Gossypium hirsutum
  Clone ID: uC-gsronu33B138e08b1.pep
PTPPFLISTGVLYRIILKKKLRDIQWAAFILLCAGCTTAQLNSRSDHVLLTSMPCWIMAIVMALLSGFAGVYTEAIITKRPSRNITARNPWLYIPRMTFNALAILMQDIDALMHKGFLHGYSIITTLMIPNHA

SEQ ID NO: 111899 - protein, 99 aa, Gossypium hirsutum
  Clone ID: uC-gsronu33B138f05b1.pep
GGHDEDVEKLRKFARNIGLLFQVVDDILDVTKSSKELGKTAGKDLVADKVTYPKSMGINKSKEFAEKLKSDALELLQGFDPEKSTPLIALANYIAYRQN

SEQ ID NO: 111900 - protein, 61 aa, Gossypium hirsutum
  Clone ID: uC-gsronu33B138f08b1.pep
LLLIIRSLITCEGNFEGIVSSSIRDSPSAGAGLLLTPSSCTVNGVELIDCYSESSYTGRRG

SEQ ID NO: 111901 - protein, 106 aa, Gossypium hirsutum
  Clone ID: uC-gsronu33B138g09b1.pep
KLDDAFSLYEQAIAIEKGKEHSQTLPMVYAQYSRFSFLVSGNAEKAREILTRSLDHVQLCKQFLEALIHFETILPPLRQTDYLESLIDKLLAPSLDGSTADKEDLS

SEQ ID NO: 111902 - protein, 113 aa, Gossypium hirsutum
  Clone ID: uC-gsronu33B138g11b1.pep
LRVRFLLSCSLDQTIKVWVASENGNLEVTYTHNEEHGLLNLRGMHDLESKPVLLCACNDNYVRLYDLPSFSERGRIFAKQEIRAIEVGPRGLFFTGDGTGFKVWKWAEPVATT

SEQ ID NO: 111903 - protein, 67 aa, Gossypium hirsutum
  Clone ID: uC-gsronu33B138h02b1.pep
CYYQVRKRAIGKGKIQLGLDTNKSLGDGPPHRYHRPYKWCDCYFQLKYPPTKTRCYAASPTPDHPRS

SEQ ID NO: 111904 - protein, 36 aa, Gossypium hirsutum
  Clone ID: uC-gsronu33B138h03b1.pep
AADGLSAKISSSHERLSASRAICFTTGSLRSMENKE

SEQ ID NO: 111905 - protein, 140 aa, Gossypium hirsutum
  Clone ID: uC-gsronu33B138h11b1.pep
HASAFTYSPKHHTITPFHHKNITLISQHVSLIIKQIDSSQKKLARIENQLLGYQTLNVSRPNLANELKLFLQHHQLPLGKDSRTGITEMVASVGHSCEKSAGLLSQYMTYKVSGPCPDDWSLAQKLILRGCEPLPRRRCF

SEQ ID NO: 111906 - protein, 167 aa, Gossypium hirsutum
  unsure (1)..(167): unsure at all Xaa locations
  Clone ID: uC-gsronu33B138h12b1.pep
LWDVQFSPVGHYFASSSHDRTARIWSMDRIQPLRIMAGHLSDVDCVQWHANCNYIATGSSDRTVRLWDVQSGECVRIFIGHRSMILSLAMSPDGRYMASGDEDGTIMMWDLSSGXRCVTPLMGHTXCVWSLAFXCEGTALASGSADCTVKLWDVTTSTKAPENEDKS

SEQ ID NO: 111907 - protein, 51 aa, Gossypium hirsutum
  Clone ID: uC-gsronu33B139a05b1.pep
PLFPMRCCSLIPEHHILLRIPSTASTARKPALMNLVISHGFSLPPLPRLMR

SEQ ID NO: 111908 - protein, 104 aa, Gossypium hirsutum
  Clone ID: uC-gsronu33B139a08b1.pep
CTSPILPGPLNLKQPYPSPNHQQKKNKEAANPRCLHLHRLSSTCSHHLLEDLRWPPRRRKKSIRATPATGPQRLRNGHREILSPDIGSEGRAKRTLYLPFFVLN

SEQ ID NO: 111909 - protein, 43 aa, Gossypium hirsutum
  Clone ID: uC-gsronu33B139c01b1.pep
LSMSEDLWCIKKLNYGSDEKCGLSDWLNSRPSSPLIFVDPRDI

SEQ ID NO: 111910 - protein, 75 aa, Gossypium hirsutum
  Clone ID: uC-gsronu33B139c12b1.pep
MSHGVHAQQHVAQGTAVPAICHGKKEKKMKDKKEKDKDKKEKKEKKEKKEKKTESKKKPEKEKSKHKKEQRRQSQ

SEQ ID NO: 111911 - protein, 121 aa, Gossypium hirsutum
  Clone ID: uC-gsronu33B139d05b1.pep
FYYQTLTQMQNRPVGPKPKLVSAKLKPYPFLQPPLLTIGHLGHHRRTPPRTRLAIHVTFNAVVGASFSRQRSGRAFWFVGNIASVDREPRGPFILFYFFPSFFFYFRFLVGDSGILPLDLG

SEQ ID NO: 111912 - protein, 63 aa, Gossypium hirsutum
  Clone ID: uC-gsronu33B139d07b1.pep
FSLGVSPRDHVDGLNEGGDLGNRAAPALDCATDDTADDLIKLVTKGERNAVKELAKVQQSLQR

SEQ ID NO: 111913 - protein, 68 aa, Gossypium hirsutum
  Clone ID: uC-gsronu33B139f07b1.pep
PFFQFYFTQNDQQANFSKTRMITSNLLIVNKKKILYTKVSLSNPVIPFQQSFQHYFFFVFFRIQIRFI

SEQ ID NO: 111914 - protein, 41 aa, Gossypium hirsutum
  Clone ID: uC-gsronu33B139f09b1.pep
FRVNKIKNYYYSKKKSEMKMLWLASLELKVYQYLSNFSEYL

SEQ ID NO: 111915 - protein, 53 aa, Gossypium hirsutum
  Clone ID: uC-gsronu33B139f10b1.pep
FSYFFFFFFNRHQTNSHLFQTTHHYGSSYYELYISIGRTKRIIFTTTPQKKMK

SEQ ID NO: 111916 - protein, 173 aa, Gossypium hirsutum
  Clone ID: uC-gsronu33B139f12b1.pep
YAAAYERIVELQGEALKVLKALEEVVGHLRKFLVDHSVLPLFEKMDLQAETQAEKSSLLTASQSGIGIDLPVTARGDSLFLEHETQLESRIPSSGISFYTQDPTLSAIYSSSGLVRSVVPIVTQIAQTMQIPFSYAEDIIGIGGANIAHIRCTSGAVITVQESRGMSDEITVE

SEQ ID NO: 111917 - protein, 70 aa, Gossypium hirsutum
  Clone ID: uC-gsronu33B143a01b1.pep
AQETLAKDQARAQGQTSHAPKKTTAPRATGRQNEQRPTHTAKAKPEPHHKPGAKTGIQAATLPGRQALAA

SEQ ID NO: 111918 - protein, 94 aa, Gossypium hirsutum
  Clone ID: uC-gsronu33B143a04b1.pep
TPLPSHHPKNPNCNQKKRTHYPPSIMLLNSPPLPKNPRVWIQVRNPNSHPGLNEKGPIRTDPPLINESSLSAANPSAYSLAEIWPNLNNPGSDP

SEQ ID NO: 111919 - protein, 114 aa, Gossypium hirsutum
  unsure (1)..(114): unsure at all Xaa locations
  Clone ID: uC-gsronu33B143a06b1.pep
DRVGPRVRSAEGGFFNVVVGDPNEHYGLGVTRNGEXATAITGPIMLAKMSGRPEPKSHWGNKIGKPHTGPCKDTGKRVAXTNRMVPASTGAGIGDDRTTENLLNNGFNGSIYPS

SEQ ID NO: 111920 - protein, 38 aa, Gossypium hirsutum
  Clone ID: uC-gsronu33B143a11b1.pep
DAWVDSKAARWAFLTRLLNYRPRLLILWSKFYSMIIDY

SEQ ID NO: 111921 - protein, 84 aa, Gossypium hirsutum
  Clone ID: uC-gsronu33B143b05b1.pep
FSLKKRRDYFDRLRKNPFFSKKEFIFGRNTKMNDIEPNLISITFTIKICNWKTTTVIKLKFEDYISTRGLAVINRVGTLPPTLE

SEQ ID NO: 111922 - protein, 83 aa, Gossypium hirsutum
  Clone ID: uC-gsronu33B143b10b1.pep
ILIQCLVGLQPQIDSTVSICYRLGSITKFTVHTRSYHQSIVKVSRQTPNTCFLSFDKLPKIHDHHQSIIVMFLPLVTGSSFLK

SEQ ID NO: 111923 - protein, 158 aa, Gossypium hirsutum
  unsure (1)..(158): unsure at all Xaa locations
  Clone ID: uC-gsronu33B143c03b1.pep
VFKFHQFDWEVIKDALDGKLPSLSVIEPRYFDLKGLPANDDHPSHDVANGQKLVKEVYETLRASPQWNETLLVITYDEHGGFYDHVKTPFVNVPNPDGNTGPAPSFFKLDRLGVRVPTIMVSPWIKTGTVISGPKGPTPNSKFEHSSIPATXKKIFNL

SEQ ID NO: 111924 - protein, 138 aa, Gossypium hirsutum
  unsure (1)..(138): unsure at all Xaa locations
  Clone ID: uC-gsronu33B143c06b1.pep
VVSNXGNPXXXIGKLNQYSEQPHKAXDSFPFKWINKKWXEGFYVTSMTTAGSRWGVVMSRNAGFSDQVVELDFLYPSEGIHRRWDSGYRITSTAATXDQAALILSIPKRKPGDETQETLRTSQFPAXHVRENGQKSLS

SEQ ID NO: 111925 - protein, 133 aa, Gossypium hirsutum
  unsure (1)..(133): unsure at all Xaa locations
  Clone ID: uC-gsronu33B143c07b1.pep
SHQDQTQLLAVNLTQLAMYDMRKMACIKQLALGEASAXIYHATFSCDSQLVNTSHADGTVRIFGASNLQLQRQINPAAYLPSNASSTDYPLVVAAHPQEPNQFAIGLTDGRAYVLEPLESEGEGDVSAPTSTH

SEQ ID NO: 111926 - protein, 78 aa, Gossypium hirsutum
  Clone ID: uC-gsronu33B143e02b1.pep
TYLRSLTSSVGADVSPAMVPLQQPKAGLIAPKSSLVVRLSQTKHQASTRGLPVTKRTVGLRLGHHLRCSIGGRASMGL

SEQ ID NO: 111927 - protein, 118 aa, Gossypium hirsutum
  unsure (1)..(118): unsure at all Xaa locations
  Clone ID: uC-gsronu33B143e07b1.pep
FLSFHFRDKNRVSPYSQGYNELYRVALPEITEVLRSICKRYELPLALTWAPSRHSDKNFYCCVSTSGSSCFVADEGLTGFLEACSEHQLFRGQGIVGXLTTNKPCFATDITSFSKTIY

SEQ ID NO: 111928 - protein, 144 aa, Gossypium hirsutum
  unsure (1)..(144): unsure at all Xaa locations
  Clone ID: uC-gsronu33B143f03b1.pep
KKRDLSVKEGHVFQMECCEERPILESNVGMGANLCTYHQKKSLGDQTSGSICNGNETXGNVLLLEPADKSPFIGDIKAGYSQSSLETNMHKADILTHKVPSTDLLLARTPKGKLSIRRMDRIAGAGQQEPLMEVSAPGSRISDI

SEQ ID NO: 111929 - protein, 80 aa, Gossypium hirsutum
  Clone ID: uC-gsronu33B143f06b1.pep
RHDAERLVIDWVEFHNSLFCVFRQTYSTCFVFIFGLLKMVYEIRQSAFCLHIFSSLKDFYLNLKILDNHSFFGNLLSSLV

SEQ ID NO: 111930 - protein, 57 aa, Gossypium hirsutum
  Clone ID: uC-gsronu33B143f10b1.pep
SSFLSLNLFSGCDFQRVHLSIDPFLLFLKMFFLVIFDSQYVCTFCLLSSVTLIVFLF

SEQ ID NO: 111931 - protein, 67 aa, Gossypium hirsutum
  Clone ID: uC-gsronu33B143g02b1.pep
RVRHKIGIAGAMFDMFVGTPPQGLTTQIVTTQIASATLNLQTGDRGKIGITSNAALRPQSSLFPAAL

SEQ ID NO: 111932 - protein, 108 aa, Gossypium hirsutum
  unsure (1)..(108): unsure at all Xaa locations
  Clone ID: uC-gsronu33B143g03b1.pep
MAPKKDKAPATSYKPAKTAGATQNKKKRGKGKLKEQAKTKELVDQATNDKLSYEAPKYKERTDSILTERERTNGPHARQAITELRARGXSGSEDDRSSQQIYTRATNT

SEQ ID NO: 111933 - protein, 153 aa, Gossypium hirsutum
  Clone ID: uC-gsronu33B143g09b1.pep
MPKDHYEQMGTYDSNDKTTETTNNSSKIGNSSLRQRPVTHESVHDTQNHLLSKDSLNSNEWVDISQKELDEAIMLETQLFSQIPEGSSYILSHEQGGPGRSINPGLEAVSGPQPSSIMDQCLLRQQQDEEYLISLLADKEKEMNALKKAEIIV

SEQ ID NO: 111934 - protein, 140 aa, Gossypium hirsutum
  Clone ID: uC-gsronu33B144d04b1.pep
FSSGQQQTSTKSLAANDITGVSSAPSPGATEPLASEGFIRGRSYNIRMDDQVLLRFSPKNSESTYYFSDMIGGTLTFFHEEGARRCLEVSVTLETSETISRRFVHPSRRNSSTITKVQSDHHEVGADLVQTGFLFSVPMD

SEQ ID NO: 111935 - protein, 92 aa, Gossypium hirsutum
  unsure (1)..(92): unsure at all Xaa locations
  Clone ID: uC-gsronu33B144e02b1.pep
YRSRGKPKSTKGAFRTHMAGLQLPEGRIARFLKAAKYAERVGAGAPVYLSGGXEYLAVEAIELAGNTGRDXKRNRNVSRHSQLAARNHEELS

SEQ ID NO: 111936 - protein, 54 aa, Gossypium hirsutum
  Clone ID: uC-gsronu33B144g03b1.pep
LFCPVLGPGLWGLPLVPCICLTCGVFGQPSAFNTACSSSTRAGPFCLMEFCLPR

SEQ ID NO: 111937 - protein, 57 aa, Gossypium hirsutum
  Clone ID: uC-gsronu33B145a01b1.pep
GWEIWAVQYAQMLGKVGGVGFFAIRLGEGRGRLFKAIRWGTQRGLGRGIEIKSGQWE

SEQ ID NO: 111938 - protein, 88 aa, Gossypium hirsutum
  unsure (1)..(88): unsure at all Xaa locations
  Clone ID: uC-gsronu33B145a02b1.pep
LLRQLQPPNYGQQPKRPAPKSHKPPVHELPKKPPTYKPXASIHEPPKNPPMYKPKPPLHELPKKPPIHEPKPPKPPVHEPPKKEKPEH

SEQ ID NO: 111939 - protein, 47 aa, Gossypium hirsutum
  Clone ID: uC-gsronu33B145b12b1.pep
EFSFRSPGFFFRRPPFLYIGGGCNIYFFIYFFFFFFFYLENVQEPYH

SEQ ID NO: 111940 - protein, 70 aa, Gossypium hirsutum
  Clone ID: uC-gsronu33B145c06b1.pep
VFLRWWFVFLARRRVRRRTTPTINNDYHSLQWRHVRRQWFDFLAAPCKGSFLSSEHQSFNRKVFSMFILI

SEQ ID NO: 111941 - protein, 52 aa, Gossypium hirsutum
  unsure (1)..(52): unsure at all Xaa locations
  Clone ID: uC-gsronu33B145c08b1.pep
NLQKVALLEVECTSLNQELQDVEARFRRGQKKSPEEANQMLQMXAWXEESER

SEQ ID NO: 111942 - protein, 93 aa, Gossypium hirsutum
  Clone ID: uC-gsronu33B145d08b1.pep
SYLSGERNEKHYWFGKDLKAKRVATNTLASLPFFFLPSPTYSSSLCNCNTKSFLTTKMVLSRSDRTKDENITPIFLHYMDDMMLAFTASNFRT

SEQ ID NO: 111943 - protein, 68 aa, Gossypium hirsutum
  Clone ID: uC-gsronu33B145e06b1.pep
TIKTLFSFYHLRWLITDFFLFLVHRTPKTPGRDGDDDDDDEGLFTIEGPTPIPNLKYTTRDGNQTRGL

SEQ ID NO: 111944 - protein, 116 aa, Gossypium hirsutum
  unsure (1)..(116): unsure at all Xaa locations
  Clone ID: uC-gsronu33B145e07b1.pep
IISPQSIFSRSVLIYDPDSKQRRLKFRWINGEASGWSKGGVKKKAVSKSVXAGLQFPAGRMAQVLKKGPYAQRYGGGAPDYLADDLEYHAADAEELAENAARDNKQNRINPWHVLL

SEQ ID NO: 111945 - protein, 114 aa, Gossypium hirsutum
  Clone ID: uC-gsronu33B145f09b1.pep
EIKKKSSWKHRWLKNHTTSRSFPSRVLVALRLSPVLSLGRNVPTDYGCIHTQHHSESAPLGGLGSGRHGALTLVGAPLQRTWVRSVSENASPGCPSPAELSASRAGHVRLARRY

SEQ ID NO: 111946 - protein, 170 aa, Gossypium hirsutum
  unsure (1)..(170): unsure at all Xaa locations
  Clone ID: uC-gsronu33B145g01b1.pep
HLFDLIVQHIRTKVGQHDLCRIYPNVYVIXSTFQIRGMHXLIRDRDISKHDFVFYSDRLIRLVGEHGLGHLPFTEKQVVTPTATVYTGVDFCKKLCGVSIVRSGESMENALRACCKGIKIGKILIHREGDDGKQLIYEKLPTDISERHVLLLDPXLATGNSANQAIELLI

SEQ ID NO: 111947 - protein, 40 aa, Gossypium hirsutum
  Clone ID: uC-gsronu33B146a12b1.pep
MLKSDNIPHFKPMQVALEIGVNVSLKSHRSISTNTYFGTG

SEQ ID NO: 111948 - protein, 38 aa, Gossypium hirsutum
  Clone ID: uC-gsronu33B146b12b1.pep
IRTIDPVATEEVLFTDVLTFETNAERPFVADPDYVFPT

SEQ ID NO: 111949 - protein, 114 aa, Gossypium hirsutum
  Clone ID: uC-gsronu33B146c01b1.pep
PFYISQKKKQKKGKIKKKKWGKKKAKTKANTAGLIGGPRVPPASLRGSTSYTGSRNQTPLAYACRLRTWPNLGVPPRLPLAVLARLATWRMLVKAQRGRPFQPWPPLKGPWCPP

SEQ ID NO: 111950 - protein, 93 aa, Gossypium hirsutum
  unsure (1)..(93): unsure at all Xaa locations
  Clone ID: uC-gsronu33B146e04b1.pep
IFLPRIGEYAFGVITSSVILQSYSGDEELCCVYVPTNHXYIGDIFLINTKDVIRPNLSVREGIEIVVSGGMSMPQILSTVDTRLPLESRSDRS

SEQ ID NO: 111951 - protein, 64 aa, Gossypium hirsutum
  Clone ID: uC-gsronu33B146h01b1.pep
LLQAGFDGKNCIADEHYLPTFFNMIDPGGIANWSVTHVDWSERKWHPKSYKAQDATEDLLNNIT

SEQ ID NO: 111952 - protein, 63 aa, Gossypium hirsutum
  Clone ID: uC-gsronu33B147a08b1.pep
NEAHYSVYHGVSGLGKGSARGPVWPENHQNNPKQLKSHTFFFQKKKTRTPFFLFWGLSRRRTK

SEQ ID NO: 111953 - protein, 115 aa, Gossypium hirsutum
  Clone ID: uC-gsronu33B147c02b1.pep
GSVYLKAEDNVKATFEQSVENLEMTLDKSQNSSDISDTRDEDSNSFAREANHNKEVTVSPLPNVLKPFETNQVALSSYRNGTVEVNGFHENGLTEVKKLSNRRKHRLGCFGFNSG

SEQ ID NO: 111954 - protein, 65 aa, Gossypium hirsutum
  Clone ID: uC-gsronu33B147c06b1.pep
IKLETPHTFTVLHTIFYFSKALLEKTKTILVNPRKQPWQNCQFTYPLIDSHIEKSKQNKTHQQMT

SEQ ID NO: 111955 - protein, 61 aa, Gossypium hirsutum
  Clone ID: uC-gsronu33B147c07b1.pep
LDIHADAGILTVLLQNHMGGLQVLHDSQWFDVHPTRGGLVINVGDLLQVSFNSHKLYMKLS

SEQ ID NO: 111956 - protein, 108 aa, Gossypium hirsutum
  Clone ID: uC-gsronu33B147c12b1.pep
VVMRVKEQLDRSRQRLYHERTQIIAARLGLPASSSRAMPPPNAANRVATNFANSVARPPMSMKAPRPPLSRPMGSMTPTPSNPYVSNTVAGSSIRPGSQDNLSSVGTK

SEQ ID NO: 111957 - protein, 65 aa, Gossypium hirsutum
  Clone ID: uC-gsronu33B147e07b1.pep
SLVRTPGCFYNPHAYLEIIVFTGWKGPHCGVGDKRQQIGTFMSEVESERRLGKSEILQNACVDVR

SEQ ID NO: 111958 - protein, 49 aa, Gossypium hirsutum
  Clone ID: uC-gsronu33B148a05b1.pep
RPRVLCDCSPIIIYVRMGSTMHYAASINSFSENMSDIRPAHPGNGSAGG

SEQ ID NO: 111959 - protein, 42 aa, Gossypium hirsutum
  unsure (1)..(42): unsure at all Xaa locations
  Clone ID: uC-gsronu33B148b05b1.pep
VSGKGTRQWHDLWNALYXERVITIGQHIGVEFSNQILATMLY

SEQ ID NO: 111960 - protein, 56 aa, Gossypium hirsutum
  Clone ID: uC-gsronu33B148c03b1.pep
MNYIKCWIWRTILVCICNTQLILGALINQSNPITFGPIRPKLLNQTPNPSLTLNSG

SEQ ID NO: 111961 - protein, 29 aa, Gossypium hirsutum
  Clone ID: uC-gsronu33B148c05b1.pep
GLLEYFKNFEQTCSTYCVLECYLQPRSAC

SEQ ID NO: 111962 - protein, 101 aa, Gossypium hirsutum
  Clone ID: uC-gsronu33B148c07b1.pep
SISFSQLSQPQLMARQRNFSLQLQRCRKTAHNHRSLKKQGRYQNPGGKNRRHFLLALLLQNLWSNYLCLWLFVLLTKLFLSKIKQIKIGNLEGVSRVCAQL

SEQ ID NO: 111963 - protein, 74 aa, Gossypium hirsutum
  Clone ID: uC-gsronu33B148d07b1.pep
ALLKKKKKKKKKGGLIKKKGGEKPPGRPGEQAPPRHGPPALPWAPKYIPGPGPTPPRRGNPCRSPTQSPGASPP

SEQ ID NO: 111964 - protein, 52 aa, Gossypium hirsutum
  Clone ID: uC-gsronu33B148d08b1.pep
MRSVSCKTFLSFELVMRRVLPIWVMMGRGLRVLGWNRRFHMWGARFQPRRGI

SEQ ID NO: 111965 - protein, 53 aa, Gossypium hirsutum
  unsure (1)..(53): unsure at all Xaa locations
  Clone ID: uC-gsronu33B148e01b1.pep
PFVYCKRSSTYLKSLRVSGKYGINVCHSQNHHQSQVKSNIKKIKLSLSLSLSX

SEQ ID NO: 111966 - protein, 53 aa, Gossypium hirsutum
  Clone ID: uC-gsronu33B148f04b1.pep
LKDGSLDGNEHIRFMNKLLIASKLKYTGFTMTCCELRLVSRNAYLRSLNQMLL

SEQ ID NO: 111967 - protein, 104 aa, Gossypium hirsutum
  Clone ID: uC-gsronu33B148f12b1.pep
MKLTWTRGMVRSKSRGQETKKENPQAEAKEDPKRLGAKWKTTTAAEKKPYQEVYPAKKEVYLQAIAKEKPQTEALKPLEDEHKPKTALESLEQHLQFKEEAEKE

SEQ ID NO: 111968 - protein, 66 aa, Gossypium hirsutum
  Clone ID: uC-gsronu33B148g08b1.pep
PLRSSRGLDYYAPTDLLSGRSSEITCPKPSPKLKTMFLVEWIYGILAFLGLWHGETKISFVGLDNA

SEQ ID NO: 111969 - protein, 140 aa, Gossypium hirsutum
  unsure (1)..(140): unsure at all Xaa locations
  Clone ID: uC-gsronu33B149a01b1.pep
VAWVAIDIKTRATTRAVFGVLSLLFGVIAENKKPAFGNPEIQTSPLRVICNYPSDPTVGLGFLSIAXLTTSGALGYYSVFHPYNSTYVSYYVFFRSIPFFVLFLITMGLSTLGXGMLTWLTITELSHLTNKRHKDMETTC

SEQ ID NO: 111970 - protein, 154 aa, Gossypium hirsutum
  Clone ID: uC-gsronu33B149a06b1.pep
PTRPGTIARGTAPVNDERLKLQLQYSEKDQAENLMIVDLLRNDLGRVCEPGTVHVPHLMEVESYATVHTMVSTIRGKKQSNVSAVDCVKAAFPGGSMTGAPKLRSMELLDSIESCSRGIYSGSIGFFSYNQTFDLNIVIRTVVIHENEATIGAG

SEQ ID NO: 111971 - protein, 69 aa, Gossypium hirsutum
  unsure (1)..(69): unsure at all Xaa locations
  Clone ID: uC-gsronu33B149b03b1.pep
DEPEPSDSTTVGSNVRKDLSEWQERHATLVLTTVKXIKKLRYELCPRLMKERTSWRIYFTLVSTHXAPY

SEQ ID NO: 111972 - protein, 34 aa, Gossypium hirsutum
  Clone ID: uC-gsronu33B149b05b1.pep
MGLVMQSHQKIDQNEACKKLGASKDGADIEENLR

SEQ ID NO: 111973 - protein, 96 aa, Gossypium hirsutum
  Clone ID: uC-gsronu33B149b12b1.pep
CYASDATHLATTTFTQTYQTSNKQFTGNFSFFRSDLLFFFVLFFWCHFFFQFLSLLFLFCFCSFSLFFFWVVRFRFPCAFYGIWFLIDGNSKLGVF

SEQ ID NO: 111974 - protein, 148 aa, Gossypium hirsutum
  Clone ID: uC-gsronu33B149c03b1.pep
PSRPDLLILILVLFSGTFLLSSYFSYLFHSLSLLLSPLLSTQSASFSLPFVSYLLGCTLFFVTTLISIEFCCGSRSRKCEKPGCKGLNKALEFDLQLQTEDCVKNGSQEIDRSPWKGGSEGNPDYECLRAELRQMAPPNGRAVLLFRA

SEQ ID NO: 111975 - protein, 46 aa, Gossypium hirsutum
  Clone ID: uC-gsronu33B149c07b1.pep
ETLDLHPLNPSIHYANLTKIANKQKPNFYFIKTRKPNNALGQKRLT

SEQ ID NO: 111976 - protein, 62 aa, Gossypium hirsutum
  Clone ID: uC-gsronu33B149c08b1.pep
RMKDGSGDITSHSSHCDCAAKATYLVFCAAIREMHDLKLDQVNRTKLLLWRDAGNTALKLQF

SEQ ID NO: 111977 - protein, 164 aa, Gossypium hirsutum
  Clone ID: uC-gsronu33B149d05b1.pep
DTLIKGLALLPLVVFGGTTISEAREVEVGSYLPPSPSDPSFVVFKASTKDTPALRAGNVQPYQFLIPPTWKQSRVANILSGNYCQPKCAEPWVEVKFEDEKQGKIQGVASPLIRLTNKPNASIEEIGNPEKVIASLGPFVTGNSYDPDELLETSVENVGTDVLQ

SEQ ID NO: 111978 - protein, 84 aa, Gossypium hirsutum
  Clone ID: uC-gsronu33B149d10b1.pep
ANAPLSLQLEAIATQLTTIGSDLGYFCFRFFCYNLSSIFSKLLSNGEIDRRERAEQTSDKRKWLSPQEAYKFCRHDRMRDALQV

SEQ ID NO: 111979 - protein, 163 aa, Gossypium hirsutum
  unsure (1)..(163): unsure at all Xaa locations
  Clone ID: uC-gsronu33B149e06b1.pep
FLSSPVAEPQVSDYALEEDFSEYVNSVHIEDNPVDNYSIPEQPEQEAVEDEDPVEEAPTEEETLVSHHSVVNTVQEPPSIPLEEPVGEPPRRTYASILSVPKQQSASSAQVQPSYNKIPSSTSDWDQTPEYTNQQSHSAWSDVPESXAETAVEEALVSEEGDI

SEQ ID NO: 111980 - protein, 46 aa, Gossypium hirsutum
  Clone ID: uC-gsronu33B149e07b1.pep
VLYISGKKSKWNLLLHMKMGYKKEEGTFYSSVKPSQLTHSKQKTGK

SEQ ID NO: 111981 - protein, 63 aa, Gossypium hirsutum
  Clone ID: uC-gsronu33B149e09b1.pep
QNSTNIIAKLYQNKIKIAANSNKTTINSNGKYLTRLNPFKKRTLFFVQAHLLGSYFRRNPSTS

SEQ ID NO: 111982 - protein, 100 aa, Gossypium hirsutum
  unsure (1)..(100): unsure at all Xaa locations
  Clone ID: uC-gsronu33B149e10b1.pep
SNHLKIYNTMXASYSAYFDTSVSVFLFPKVTDSYFFFLFFFSIKDKKAGGDNLMIETPLKKIRIKVINLPPPQAPKKRKPVGTAKKIPSLTSEIKHNGEL

SEQ ID NO: 111983 - protein, 154 aa, Gossypium hirsutum
  Clone ID: uC-gsronu33B149e12b1.pep
LRVRKEVAATEHDWGSLSTREELRSSFNDLKNQLYGKDNNKVSVKDFHGLQQALDNTIAWGKPPDYLELIAIRIEKARGKAAEVSHIGIQVLVCAAIKEMEDFRIEDLEWDTLKKWGATLNMAKQLGFQVVFADNLLKTKLLAYFATQKLLDAT

SEQ ID NO: 111984 - protein, 84 aa, Gossypium hirsutum
  Clone ID: uC-gsronu33B149f09b1.pep
LFFFFCCYHHGEVFNTIWASNTQEPPTHMHRGGIKKRNHKHGRRQLDGLEPRRLSKIKQMIPKRTRIHMTGSYMRCMKADRQSL

SEQ ID NO: 111985 - protein, 169 aa, Gossypium hirsutum
  unsure (1)..(169): unsure at all Xaa locations
  Clone ID: uC-gsronu33B149f10b1.pep
WSSISLVSQTKAIFGGFFSYCLPSTQSGASGSLVLGGNSSVYNTSSPISYTRMIPNPKLSTFYFLNLTGISVGGVTLQDLSFGKSSMLIDSGTVITRLPPTMYRALKAEFQKQFSSFPTAPAFSILDTCFNLSAYQEVDVPTIKLQFEGNAEXEVDITXVFYFVKTDAS

SEQ ID NO: 111986 - protein, 80 aa, Gossypium hirsutum
  Clone ID: uC-gsronu33B149g11b1.pep
EGWTMQDGTPWPGNNVRDHPGMIQVFLGHDGVRDIEGNELPRLIYVSREKRPGFDHHKKAGANSSYFLKIVEFYGSTLGM

SEQ ID NO: 111987 - protein, 92 aa, Gossypium hirsutum
  unsure (1)..(92): unsure at all Xaa locations
  Clone ID: uC-gsronu33B149h12b1.pep
YVDPGILIRKLQKSGKHAQLWGSAQKGSNNFPNQMTNHFMNMHIDGGKGGKDNRSQKGGNGGGRXAGKSHQQKGGQQFGPPPHLMQQMMKGP

SEQ ID NO: 111988 - protein, 53 aa, Gossypium hirsutum
  Clone ID: uC-gsronu33B150a03b1.pep
KAKRMTWETNDLCYQNDLAIVCLLFNLFIYVKRWRMLQSFEVEVQWRITQEPA

SEQ ID NO: 111989 - protein, 69 aa, Gossypium hirsutum
  Clone ID: uC-gsronu33B150b01b1.pep
GLSSLARTSIATERAEIQQHQVHGGVMTWRCNTRGGLIPNCGADYSRNPRGFWRFQIGPLQIGLGFNSV

SEQ ID NO: 111990 - protein, 103 aa, Gossypium hirsutum
  Clone ID: uC-gsronu33B150b05b1.pep
KNDVLTNVTDSPREVLSHSFTASCLGPPLGSSSRSWDRVGTVFGPISSQLFGSIASQTRPIGEKSWFTLEPTKMKFPPTFPENGHRKIFPMMSIRCVCINQDN

SEQ ID NO: 111991 - protein, 101 aa, Gossypium hirsutum
  Clone ID: uC-gsronu33B150c11b1.pep
FRVRNDTLVSGRHLIARYLKLQNTQPMELDECAELFYEGISSYGPYWDHVLGYWKVSLERPDKLMCLKYQYGAGDTVLCLQRPPEYMGYALSHAEQHQGRP

SEQ ID NO: 111992 - protein, 60 aa, Gossypium hirsutum
  Clone ID: uC-gsronu33B150d01b1.pep
FVCKLNHNDKHYSSLFSNVAFLKLAILLKHYQKLKENKGKIIVIIDTSLAAGFLLFLAKI

SEQ ID NO: 111993 - protein, 136 aa, Gossypium hirsutum
  Clone ID: uC-gsronu33B150e01b1.pep
MSLTIPSLLSGPRTDIFDPFSVWDLSDEFFNSALAHTMTSSSSVREASDIANPRVDWKETPQARVFKADLPGLKKEEVQVEVEEGRVLQISGERSKEHDEKNDKWHRVERSTGKFLRRFRLPENAKMEHAKASMEN

SEQ ID NO: 111994 - protein, 172 aa, Gossypium hirsutum
  Clone ID: uC-gsronu33B150f11b1.pep
LNMEHRERIGNGGSSLCPISSPDLILMELKEAKLNLGVKVKPQIANNVGAANHGSFENCSNILRSPFHNNSKLEQFKKTVDPAKTEVPRSTPLPGNEENRPCRRTAQMRWIAAKKMEEAARAAEALALIEMNALTGMKGLPSNANSSGFSLPEPEPEPLLGTPNVIRAEEVS

SEQ ID NO: 111995 - protein, 88 aa, Gossypium hirsutum
  Clone ID: uC-gsronu33B150g04b1.pep
KKKKKKKKKEGIIKKKFKKKTKKKKKKKRGGGSSFSGPTVPSWRSQGCLLVLRKLNLMAGVLHFHGWECQSLAHPKLLGADPPFPGGR

SEQ ID NO: 111996 - protein, 70 aa, Gossypium hirsutum
  Clone ID: uC-gsronu33B150g05b1.pep
LSDAVEYVYSGFKMGPQAILCIMPFSCIEVLGCALRSKSGFFLISYLLYQLLEWFVVHTTQLIELKIQVA

SEQ ID NO: 111997 - protein, 139 aa, Gossypium hirsutum
  Clone ID: uC-gsronu33B150g12b1.pep
MKQLIRRLSRVADVSAQYNLLRSDSSSSSSGSRHRSSAARAESFRVAVKKTVPQGYVPVYVGEEMERFVVSAELLNHPVFVGLLNKSAQEYGYEQKGVLHIPCHVLVFERVMEALRLGVESRDLQDLLRSFSDDWLNDF

SEQ ID NO: 111998 - protein, 136 aa, Gossypium hirsutum
  Clone ID: uC-gsronu33B150h09b1.pep
MSEPIAKPQKHANSYLHITDGEERIRTLITEFAQQVDDPEDREWTKYLFPYLTVHSVSPDGPRPSVTFAFTVQPQHCNRLRNLHGGCTASLFDFCTSTPLALVSRSGFWSFLGVRPTLNTTYLRPVPCGTELLVEC

SEQ ID NO: 111999 - protein, 51 aa, Gossypium hirsutum
  Clone ID: uC-gsronu33B153a01b2.pep
NTPLPFCVSQLPSRIIQSSIEEYSIKRNTCQHSRYCNHGRPNDLYMFILCI

SEQ ID NO: 112000 - protein, 56 aa, Gossypium hirsutum
  unsure (1)..(56): unsure at all Xaa locations
  Clone ID: uC-gsronu33B153a05b2.pep
HKLQTCTLATGMSVCPILATVMNKXTKPRHVEISSHMSFNNLILILSQRMKFHVIL

SEQ ID NO: 112001 - protein, 72 aa, Gossypium hirsutum
  Clone ID: uC-gsronu33B153b02b2.pep
RNRSKILTWHPYVYREQVEDSRFGIPVFIGNKSKIADLAFLCLQRSRSKISAWHPCVYKEQVEDSRFGIPML

SEQ ID NO: 112002 - protein, 71 aa, Gossypium hirsutum
  Clone ID: uC-gsronu33B153b12b2.pep
RDFYGFWADLHPFGALATHEICTMTQKLATNPENDIGALSIPNGTVRIQEGIKPTHAWMVQSAGRMIENFF

SEQ ID NO: 112003 - protein, 123 aa, Gossypium hirsutum
  Clone ID: uC-gsronu33B153c02b2.pep
HASAHASDQIGGLQVLYEDQWLDVPPVPGALVVNVGDLLQLITNDKFKSVEHRVLANREGPRVSVASFFTTGLLPTSRVYGPIKELLSQHNPPLYRQTTVKDYVSYIYQHGLDGTSPLHLFRL

SEQ ID NO: 112004 - protein, 55 aa, Gossypium hirsutum
  Clone ID: uC-gsronu33B153c06b2.pep
VMHKLWRASDGGPIGEDDILAALRRVGRRDFAPEIAACAHGTDELPLAELLPALG

SEQ ID NO: 112005 - protein, 49 aa, Gossypium hirsutum
  Clone ID: uC-gsronu33B153d05b2.pep
VTPLQLEIWEMVLTPIHVKLWRTTPQELTTIIEELRHIQIPQEISTFDV

SEQ ID NO: 112006 - protein, 50 aa, Gossypium hirsutum
  Clone ID: uC-gsronu33B153d08b2.pep
RHGQFMKFSIEDSGIIKQQAFHRPVYFHPNCGCSQKRKERFRIEVNPPNS

SEQ ID NO: 112007 - protein, 93 aa, Gossypium hirsutum
  Clone ID: uC-gsronu33B153d10b2.pep
KRGAPPSQKRREPPGPPPAAREQRGPGQDNKRPPKKEKTPPTPRGRHRTPRTAPPRETTDGAARTCQNIKPAIPPPTKNNNVKNNPTLNYYLY

SEQ ID NO: 112008 - protein, 53 aa, Gossypium hirsutum
  Clone ID: uC-gsronu33B153f12b2.pep
PFKLRFLITKCALWNESANISISIPFQSHVLRSRAIPVLANIMTQTRNKKPLF

SEQ ID NO: 112009 - protein, 95 aa, Gossypium hirsutum
  Clone ID: uC-gsronu33B153g04b2.pep
PTRPELCIGDWVRVRPSISVPTHHWGEVTHSSIGVVHRTENGDLWVAFCFMERLWLCKACEMERVRPFKVGDKVRIREGLVTPRWGWGMETHARK

SEQ ID NO: 112010 - protein, 61 aa, Gossypium hirsutum
  Clone ID: uC-gsronu33B153g07b2.pep
FEKWKGAFSVDAEGTTENELQDGSQDLLSNFVEYIKNHKCIPLEDLAGEFKLRTQVYDLNS

SEQ ID NO: 112011 - protein, 126 aa, Gossypium hirsutum
  Clone ID: uC-gsronu33B153h01b2.pep
KEGKNPKNRAQGPGKEKGPCGEPPPPPGLKGPLKGGSPSPIRGGKFWKRPTGAALSLLPPPGKKGFPSKPLNWGTPGVSPARGVKTPAPEIYLGAPIKKLLPRQPADGNLGPPKRPPPFKKKLKNS

SEQ ID NO: 112012 - protein, 107 aa, Gossypium hirsutum
  unsure (1)..(107): unsure at all Xaa locations
  Clone ID: uC-gsronu33B154a09b2.pep
MSDPIGLQSLCVELTLDRDVDGHSAGDAMNTSRPGVTDPDHIPESXQPNLVHPQHXIDITCNQSTRSARGDAGNSNPLARKTPALEKLGHEPNVELYANMLQGASLT

SEQ ID NO: 112013 - protein, 95 aa, Gossypium hirsutum
  Clone ID: uC-gsronu33B154b10b2.pep
ERCLERKIRNQERKLIYSTTTNERSSMFDQKRNRLDFAKMIIKFQYPLDMAEPKIFNNFVKNLQPMFEFQPKDPLLIDIHHIYKKEKETLQLYFT

SEQ ID NO: 112014 - protein, 165 aa, Gossypium hirsutum
  Clone ID: uC-gsronu33B154c08b2.pep
RENTHKKEVGRDQKKKKGTQRRPKKKNKGKNGKRDKKKRKKNKREGQKTQAKKTGRRGETTQTTRLKDPEKRQAPEAKKEAQKGGKPTGRGPICNKTAGERGNSSKRKKVGKGGGFPGQKGGKPGQVKQKRGRKKKGQIRRKARGPHKQRDHLRTDAPGRKSRNH

SEQ ID NO: 112015 - protein, 90 aa, Gossypium hirsutum
  Clone ID: uC-gsronu33B154c10b2.pep
ASLAACSLKDVLGMLRSLYALNCLEDGAYLRYGYLSVENAATVRREITKICSELRPHALALVSSFGIPDAFLSPIVFNWIDANSWSSAQY

SEQ ID NO: 112016 - protein, 101 aa, Gossypium hirsutum
  Clone ID: uC-gsronu33B154d02b2.pep
MAVETSSATPSPVKTVVVLVQENRSFDHMLGWFKTINPEIDGVTGSESNPIFTFDPNFTQITFKDTAGFVDPDPDHFFHAIYEQVSGKSWDTSNPDSNPGI

SEQ ID NO: 112017 - protein, 59 aa, Gossypium hirsutum
  Clone ID: uC-gsronu33B154d11b2.pep
LFSLNLCFQGYPYKYSEFQKKKRVASYKMYRVEGKVKGSLRLSFRWLKDTFTQAVYGWW

SEQ ID NO: 112018 - protein, 45 aa, Gossypium hirsutum
  Clone ID: uC-gsronu33B154e05b2.pep
TKKKAAPIIIYFFFFFSFFFNFFFFFFFFFFFFFFFFFFFFFYID

SEQ ID NO: 112019 - protein, 42 aa, Gossypium hirsutum
  Clone ID: uC-gsronu33B154g07b2.pep
KIKTYQKLNITKIFLFKVTRSNPNCKCSLTCIYCLFRITRKE

SEQ ID NO: 112020 - protein, 114 aa, Gossypium hirsutum
  Clone ID: uC-gsronu33B154h02b2.pep
FEMATYFHGGSDFQAASADGLQTLYLMNPSCFPYADTHQQPWAATNMFLLNPTSLPQAPPSNHHQRFLGVPLPTPSTCIKPVNFDDPHRSFPLQGVVPGFHSNLWGSCVDHQNS

SEQ ID NO: 112021 - protein, 136 aa, Gossypium hirsutum
  Clone ID: uC-gsronu33B155a11b2.pep
IPDSPNLCWDVRFRVAVGTAKGIAYLHEECRDCIIHCDIKPENILLDSDYIAKVSDFGLAKLVGRDFSRVLATMRGTWGYVAPEWISGMAITPKADVYSYGMTLVEIIGGRRNVQAPQSVQNGNAFNEGRDGEKWV

SEQ ID NO: 112022 - protein, 71 aa, Gossypium hirsutum
  unsure (1)..(71): unsure at all Xaa locations
  Clone ID: uC-gsronu33B155b06b2.pep
MDDQLTGDQISEFKEAFSLFDWDGLGCIPTNVXGXAMLSLGQNLTERXLHDMINVVDARGNRTIDFPEFLN

SEQ ID NO: 112023 - protein, 55 aa, Gossypium hirsutum
  Clone ID: uC-gsronu33B155c03b2.pep
LQSILTFLIRIIYHFHINIQKYKILIYVTQIKIPINNVFFIVQVTSHSNLTSIKL

SEQ ID NO: 112024 - protein, 83 aa, Gossypium hirsutum
  Clone ID: uC-gsronu33B155d05b2.pep
SQTVMLWVVLAITRASGLLKQLLVLINYIYGLSNRRIELLCTSSRSFLLEFLVCLSLKCGCVLVAFCLYMFLTKVPLMCLLLL

SEQ ID NO: 112025 - protein, 62 aa, Gossypium hirsutum
  Clone ID: uC-gsronu33B155d07b2.pep
WNDRNIWCDVLKPRLLLMADLDFVRIFTVLVNDAPYQVMQNIKLSCILPISSTYTRAISIDT

SEQ ID NO: 112026 - protein, 102 aa, Gossypium hirsutum
  Clone ID: uC-gsronu33B155d10b2.pep
MGNEFSRKEEAEAALKAPDAVMGNRFIKLWCANRDRIPDGDINSGSGVSVTSRGLTASVIPAQRKDYFQPIPLNSPKPHSMNGLMVPPAPRKLETLEQMKEE

SEQ ID NO: 112027 - protein, 68 aa, Gossypium hirsutum
  Clone ID: uC-gsronu33B155d11b2.pep
TTASHDINIHTLCIVQRKQTKKTKVKPMVKLKEEKCNIATLWLGNRLLNQKPKKITHLAFDIAVKRNF

SEQ ID NO: 112028 - protein, 114 aa, Gossypium hirsutum
  unsure (1)..(114): unsure at all Xaa locations
  Clone ID: uC-gsronu33B155e07b2.pep
MAASFRKSEPVQGRSQTHATLEVENLNPTPASKNGCRSNRFMEDGVLLTWDNLSVTAAGGRPILQGMTGYARPGEPLAIMGPSVCGKSTLLDTLVGRQGXNTCQAGHILINGFN

SEQ ID NO: 112029 - protein, 70 aa, Gossypium hirsutum
  Clone ID: uC-gsronu33B155e08b2.pep
KKIKVFQAPGVKFEPLKPEPPLFFFFFFFFFFFFFFFFFFFFFFFFFFFFFFFFFFFFFFFFLSKQRPLT

SEQ ID NO: 112030 - protein, 102 aa, Gossypium hirsutum
  Clone ID: uC-gsronu33B155f01b2.pep
IHGISIHDCKRGGNAYVRDSPSHYGWRTISDGDAVSIFGGSHVWVDHCSLSNCTDGLVDAIQGSTAITISNNYMTHHNKVMLLGHSDSYKQDKNMQVTIAFN

SEQ ID NO: 112031 - protein, 34 aa, Gossypium hirsutum
  Clone ID: uC-gsronu33B155g09b2.pep
VNPKVLDHHLKAAGRGGLEVDVSKLIWTPYKEQS

SEQ ID NO: 112032 - protein, 88 aa, Gossypium hirsutum
  Clone ID: uC-gsronu33B155h11b2.pep
LRVRPRVRCLYDSRGLADGTSENINMVQYWMNNGVRHGEPVIRKSDDSSLRRRMKFKPRELGWKFCRPQMVNFVIFVVDAASVLKSIE

SEQ ID NO: 112033 - protein, 86 aa, Gossypium hirsutum
  Clone ID: uC-gsronu33B156b06b1.pep
VILFFKKKKKKKKKKKKKIKNSQSTFTHLLPKNTNRKKTKNKKIINKKIKTKKGRPPYKKPKFTPPSYQNKYFLKVHKKKKNRPGN

SEQ ID NO: 112034 - protein, 75 aa, Gossypium hirsutum
  Clone ID: uC-gsronu33B156c04b1.pep
RITYITLPYLTSTILGSDSDFCYQSYYKQWGLVCWHQLLHVLSQSLLLCTCFAEFGQLLCLFCLFLRVISTGLRT

SEQ ID NO: 112035 - protein, 41 aa, Gossypium hirsutum
  Clone ID: uC-gsronu33B156c11b1.pep
IIYLVPDHLIDGRNKWCTLYLNFYHRIWVIFDPSLGTCFDG

SEQ ID NO: 112036 - protein, 83 aa, Gossypium hirsutum
  Clone ID: uC-gsronu33B156d12b1.pep
GLKTVSTCFLWTSMALGYYLSTILVQIVNRATKHITNSGGWLAGNNINKNHLNLFYLILALLSLVNFCVYLFVSSRYKYRSKN

SEQ ID NO: 112037 - protein, 86 aa, Gossypium hirsutum
  Clone ID: uC-gsronu33B156e04b1.pep
LCVEEKGLSSGAIQFLAHQSSSSSSSLVSLSCPFPSSFFPSSFLCLLALSSLYLQSFLFCFFLRFIGKFVLVGLIISSLPFFFGSS

SEQ ID NO: 112038 - protein, 34 aa, Gossypium hirsutum
  unsure (1)..(34): unsure at all Xaa locations
  Clone ID: uC-gsronu33B156f03b1.pep
VEITNNLKLLPLIMLVLLISKAVGDVXNEGLYYE

SEQ ID NO: 112039 - protein, 43 aa, Gossypium hirsutum
  Clone ID: uC-gsronu33B156h02b1.pep
TALAHVYQTILRDGGGGSTLKMKMKMAFPDHTVNHDSTFVNTK

SEQ ID NO: 112040 - protein, 51 aa, Gossypium hirsutum
  Clone ID: uC-gsronu33B157a01b1.pep
CDIVVIKMIFSSRQHFHQISSLLKLPFKIYYYEDLSWVKTSDWFHWFNKKI

SEQ ID NO: 112041 - protein, 73 aa, Gossypium hirsutum
  unsure (1)..(73): unsure at all Xaa locations
  Clone ID: uC-gsronu33B157b10b1.pep
FIICFIHFYIYLNLLNFIYYLFHLLNYSYLINFFILFFFFXIYLSSLLFYFLYIISFLTYLSFFTYIFLLFIL

SEQ ID NO: 112042 - protein, 46 aa, Gossypium hirsutum
  Clone ID: uC-gsronu33B157c01b1.pep
HSIAHASGLTQDSCFWAKVEEAKEWLDNVRSVRDAMKQQQLWHKID

SEQ ID NO: 112043 - protein, 86 aa, Gossypium hirsutum
  Clone ID: uC-gsronu33B157c04b1.pep
VFKHQAKSVIDSIIVVSLVKPSTQWPTRRSTAFPYSIRKCPAGNCANPCCMIFRSSVHRLLRPEFIEYLVQHYVLNYFLYACSNEW

SEQ ID NO: 112044 - protein, 49 aa, Gossypium hirsutum
  unsure (1)..(49): unsure at all Xaa locations
  Clone ID: uC-gsronu33B157e01b1.pep
FFFXQKRNPENGILIIIDPNHQRTNLLIHTSNLSKQSTNLCFNKIIQET

SEQ ID NO: 112045 - protein, 155 aa, Gossypium hirsutum
  Clone ID: uC-gsronu33B157e04b1.pep
LVMRQPQTEEQAKACADSSESAKKDEINGRDTCSTTEKSSSLPLESTSTQVVHVQVPFETQSTLVINGSNVGLEHASPDTSMSSLGRAFDRSPSTEETVSTSCARTDTSASTQSSSDADMSGSTKATVTVIRNPSNNIMDGLMRRWDLNFFRNSR

SEQ ID NO: 112046 - protein, 41 aa, Gossypium hirsutum
  Clone ID: uC-gsronu33B157e10b1.pep
RMRAQANRTRQSYIYETERLPRHTYNIEKEKLKREDQDRSI

SEQ ID NO: 112047 - protein, 76 aa, Gossypium hirsutum
  unsure (1)..(76): unsure at all Xaa locations
  Clone ID: uC-gsronu33B157g08b1.pep
MPSKKTTSKTPAPAPKTGAAPAKKTSTNKNAALFEKRPRVFSIGGNLRPKSDLTRFVXWPRHVKFQSQMRFLFAKT

SEQ ID NO: 112048 - protein, 39 aa, Gossypium hirsutum
  Clone ID: uC-gsronu33B157g12b1.pep
YSRSVIPAPSAVTTMCRLIANSQVPLAPGLKSIKGKLAR

SEQ ID NO: 112049 - protein, 57 aa, Gossypium hirsutum
  unsure (1)..(57): unsure at all Xaa locations
  Clone ID: uC-gsronu33B157h09b1.pep
MGWTGDFDRSSSPRGRYSIVMNTWKXYDLLKKPISHYTLCPRLDSVHIVWCELYPPS

SEQ ID NO: 112050 - protein, 92 aa, Gossypium hirsutum
  Clone ID: uC-gsronu33B158b01b2.pep
KGKIFFSFVSLKNKQNKKKDEKGKQKNKPPLENLYYFDCYLCVFVCKKFTSILVAFYSRKINTKVLFFPYFLGCCVLVLLASTVIATWSAVV

SEQ ID NO: 112051 - protein, 99 aa, Gossypium hirsutum
  Clone ID: uC-gsronu33B158b06b2.pep
MFPVEYRNDGGAVVPIRVHAVLISTQHDETDTNEKIAADLKEHVIKPVIPAKYLDDKTIFHLNPSGRYVIGGPHGDAGLTGRKIIIDTYGRCYAHGGGA

SEQ ID NO: 112052 - protein, 57 aa, Gossypium hirsutum
  Clone ID: uC-gsronu33B158b10b2.pep
FSGIRCSLPKKKKNILSIFHLKAILAFFRSSSSSCFIVRSFNQKNKEAVRDASMAIS

SEQ ID NO: 112053 - protein, 126 aa, Gossypium hirsutum
  Clone ID: uC-gsronu33B158c01b2.pep
MFIFEDILPLLRLDRLRSKSRLFPESFLQTITDSMSNTSCQSSELEICRDESAALKLKLIAIASILLAGVAGVAIPLIGKHRKFLRTDGSLFVAAKAFAAGVILATGFVHMLAGGTEALTNPCLPE

SEQ ID NO: 112054 - protein, 66 aa, Gossypium hirsutum
  Clone ID: uC-gsronu33B158c04b2.pep
LGDALSHNIYMLALEPLTGLLTEAVSRDIATRCYSHKMSSNRNICRYIHPPVEHTGPASGSHNIKH

SEQ ID NO: 112055 - protein, 72 aa, Gossypium hirsutum
  Clone ID: uC-gsronu33B158e04b2.pep
GERMNSWYLIERLKNQGPWSLDTTSPANANLWANFKQRISIFFSLSFYIRIYTPQFSFSCFYPFAFLVSTTL

SEQ ID NO: 112056 - protein, 58 aa, Gossypium hirsutum
  Clone ID: uC-gsronu33B158e06b2.pep
LSFIIVSFLNLPLHYYSSCLIYFLFFSCATINLSFFLSFESSTAVQRRCLLPSTGRVG

SEQ ID NO: 112057 - protein, 180 aa, Gossypium hirsutum
  unsure (1)..(180): unsure at all Xaa locations
  Clone ID: uC-gsronu33B158f07b2.pep
VTNSEKMLTNVMSENNSDTPSPTLTSQRNTNPLTIGATVELKQTEVATPCTQHRLFPVPVPVKGIRLNNPCNGYNTIIPPMFCARSSSSMAPSPSTANQQEPAFHLNLFRHSSFEANSSGQLYDRLASNTNQSTSQLLHXLDQKLDSIEDRGHISPTTDQSASSSFCNGSLSQLNGVAYG

SEQ ID NO: 112058 - protein, 67 aa, Gossypium hirsutum
  Clone ID: uC-gsronu33B158h05b2.pep
YIQKGNRKRRILIEMVQNTNKAILISSVFYVCFCFFFFLFFFLLVLLCFFFLNQNHKNIFIEPSMSI

SEQ ID NO: 112059 - protein, 144 aa, Gossypium hirsutum
  Clone ID: uC-gsronu33B158h10b2.pep
VFLKKRGGSVFFFLIFNYKKAFSGEDDKSVDYGGAVRRMHGGTSDGEGEGVSTMADPSFPSSQLFIFCCFCRPQSGFFFPCLLLVYIRTSYYYNYYCLFIIIFNCYHLSELFHVNFEETHFVCLFFFSIKCLIIYVRVLNLIHG

SEQ ID NO: 112060 - protein, 72 aa, Gossypium hirsutum
  Clone ID: uC-gsronu33B159a01b1.pep
FNHKMISQTCHECLSLYFNIHEALSLQTWYYNIWHIYKIHSLSIYRFIAEYYTKYLIIYTPSFSGRVGGRIG

SEQ ID NO: 112061 - protein, 93 aa, Gossypium hirsutum
  Clone ID: uC-gsronu33B159a06b1.pep
DIIIDLAGFMLCRSFIPQACNFSGCLVSVSGSFLQPFPQGHGSQEQFDPHCILVLVRVVLISGPSEGSHRWGDSPDDGLRTPHLIVVSDVQEE

SEQ ID NO: 112062 - protein, 75 aa, Gossypium hirsutum
  Clone ID: uC-gsronu33B159a07b1.pep
SRVRSRYASVGVGFQFLLGPLRSFLVFLSLPSASILGTTYTLVLWVYRTFTDLVNFILFVSSHTSNSMSVRVWSY

SEQ ID NO: 112063 - protein, 59 aa, Gossypium hirsutum
  unsure (1)..(59): unsure at all Xaa locations
  Clone ID: uC-gsronu33B159b08b1.pep
FERNDKNELFGAPDPTLGLLQTQAQLCEAVKKEGXDLGEEFTADCWIPLCAASQDVPLT

SEQ ID NO: 112064 - protein, 138 aa, Gossypium hirsutum
  Clone ID: uC-gsronu33B159c08b1.pep
MRSSCISTCWIYLRLLFKLNKMNASGPARMLVWYVGHHHGRLLHCSSCLTLSNDCIFQDLIFYIPFGGKESIMNFRQNLMEAMGQNVHFVIDSWMEGDNLTASVIWHLEWKGKEIPHTTGCNFFDVNRLMESLLSAKS

SEQ ID NO: 112065 - protein, 38 aa, Gossypium hirsutum
  Clone ID: uC-gsronu33B159c09b1.pep
GQVRLKTLERVHNSKVTARKIMLLGKETKIPHHFSQSR

SEQ ID NO: 112066 - protein, 78 aa, Gossypium hirsutum
  Clone ID: uC-gsronu33B159d08b1.pep
IPPLAAHFKYISNSFISSLLSHFSLFIPFHCSSFSSPVPLLISHLEKVSFNHHLEQYSSVCGSLGSTRARGEAKSRAN

SEQ ID NO: 112067 - protein, 65 aa, Gossypium hirsutum
  Clone ID: uC-gsronu33B159e03b1.pep
PSRPPDSDSCSTEVAECVQLECPEKDDSSASECSDDYAGAVNETVATDNLTRSAHDDYQGGVVDA

SEQ ID NO: 112068 - protein, 92 aa, Gossypium hirsutum
  Clone ID: uC-gsronu33B159e05b1.pep
YLDESFSSSSLFCNSLAFIPNLCFTSFIFLFNNLPSQILNFSFLFPQICILANFTTDLTCHEVVLGISLKIHGGNWKLKLERVGNGRRDQKE

SEQ ID NO: 112069 - protein, 55 aa, Gossypium hirsutum
  Clone ID: uC-gsronu33B159e11b1.pep
KLPMPINNRIHLINYESENLALCCGQKVVEAFNENINLRRQIYLHISVCRYPFVF

SEQ ID NO: 112070 - protein, 191 aa, Gossypium hirsutum
  Clone ID: uC-gsronu33B159f04b1.pep
HVLRNINSLALFSNIEVNPRPDEKNEGGIVVEIKLKELDQKSAEVSTEWNIVPGRGGRPTLTSFQPGGTVSFEHRNLKGLNRSILGSLTTSNYLNPQDDLAFKLEYVHPYLDGVYNPRNRTFRASCFNSRKLSPVFTGGPGVDEVPPIWVDRAGVKANITENFTRQSKFTYGLVMEEITTRDESSHISAYG

SEQ ID NO: 112071 - protein, 77 aa, Gossypium hirsutum
  Clone ID: uC-gsronu33B159g01b1.pep
RNGKRKGCVVIVSFLPFCRESEKEKQKKVSIFLHFPLAECSKEERKKFVHLLSSLAENAKKKGEGEVRHSATPSSLE

SEQ ID NO: 112072 - protein, 87 aa, Gossypium hirsutum
  Clone ID: uC-gsronu33B159g05b1.pep
PFRPPTRPEVFKGGSPLVVSRPDDASEVGRALANSCRTVSGVLVDAHIGDKLSEELFLRVESRGTSHAKELLEQLQFFHIVASLSFA

SEQ ID NO: 112073 - protein, 83 aa, Gossypium hirsutum
  unsure (1)..(83): unsure at all Xaa locations
  Clone ID: uC-gsronu33B159g06b1.pep
MTNTALKYDNQSEMMKANLASDAGQELTRKISXDYHTYTDPDKIVFDEGSYFVDRTNGEGTNGNFEGGMPDAIVSPKDDACMK

SEQ ID NO: 112074 - protein, 154 aa, Gossypium hirsutum
  unsure (1)..(154): unsure at all Xaa locations
  Clone ID: uC-gsronu33B159g08b1.pep
MSFPEEGFPVNLTSLEISNGPKMYASLVEWGLKXLTSLQELNIGGEGCSHVVSFPEEGTGRMLPPPLTSICIENFENLEFMCSKGFQHLTSLHELEISNCPKLTSLPEKDMLLSLEQLHIFNCPLLEEGCSRGNGREWSKIAHIPYVRFQYKTV

SEQ ID NO: 112075 - protein, 60 aa, Gossypium hirsutum
  Clone ID: uC-gsronu33B159g12b1.pep
EDSYSSSSSHRNYLKNSNNNNKVQSFSPSTPPPTSVNYRTAKRRKGIPHRAPMAGLIIEY

SEQ ID NO: 112076 - protein, 85 aa, Gossypium hirsutum
  unsure (1)..(85): unsure at all Xaa locations
  Clone ID: uC-gsronu33B159h09b1.pep
FSRGKLYKKWGGELYSKLRRLQLVNQLWSNNKDMSXVKDSAAIVAKLIRFVEQGKALKEMFGLSFTPPHPRRRSYGWKNSMASLF

SEQ ID NO: 112077 - protein, 184 aa, Gossypium hirsutum
  Clone ID: uC-gsronu33B160a04b1.pep
MMLVYEYLPNKRGDYYLFDESKSPSLDWTTRFKIITGIAGGLLYLHEEAPQRIIHIDIKASNILLDQQLNPKISDFGLARLFPGDDTHVNTFRISGTHGYMAPEYAMHGYLSVKTDVFSYGVVVLEIVSGRKNHDSRLGSEKADLLNYSWLLFQSGKMLDLVDPTLKKYNPDEAAMCIQLGLLC

SEQ ID NO: 112078 - protein, 74 aa, Gossypium hirsutum
  Clone ID: uC-gsronu33B160a05b1.pep
THALRRRESNRGLDQLSIIGHSASRHWSHRFCLPNSCRIYPNLWSPSFPSNSALLLRLATGPYTLSEASPGGSR

SEQ ID NO: 112079 - protein, 68 aa, Gossypium hirsutum
  Clone ID: uC-gsronu33B160a06b1.pep
MKDWAAPFVAAALFAFLSPGVILQIPGKNQPIGFMNMKTSVAAIFVHAVLYALFLILFLVVLHIHLYV

SEQ ID NO: 112080 - protein, 53 aa, Gossypium hirsutum
  Clone ID: uC-gsronu33B160b02b1.pep
DLQKWHVQNYIKTKCGQSCFFYLKGSIGADSSRNAAASKHSAASRADALTSAL

SEQ ID NO: 112081 - protein, 169 aa, Gossypium hirsutum
  Clone ID: uC-gsronu33B160b07b1.pep
LCVRTFARDMTLKSTKALVQPASIPDDLDPWRSKLLWASRVLPMPLVGLLIISGVCADGGSQASNYPELEALSRLDFGAAMKVFLAKRLTSEFTQVTADVEEKSVIIGERNRAATEALRRAVNDGHNKIAILYGGGHMPDLGRRLREEFDLVPSRVHWITAWSITKDLQ

SEQ ID NO: 112082 - protein, 117 aa, Gossypium hirsutum
  unsure (1)..(117): unsure at all Xaa locations
  Clone ID: uC-gsronu33B160b08b1.pep
SRVRLWLRKDRTMPTVFTTVRPERVMILPGLILWNEGTATLHEMAHLVSSRDDRTDESDEVRATAETKKMDELIHEDKGNGTITNDXSTMNRILNGEHYXYICYTIGACVQTALYET

SEQ ID NO: 112083 - protein, 119 aa, Gossypium hirsutum
  Clone ID: uC-gsronu33B160c01b1.pep
PLGRQANINPTGGFLKKILEKNTAKAYEKKQKEKGGRIGGNQAGGGGLGERGFGSGAGEGKAFVWGARHQIPGPGCYNPRLGKPRAFPILMLWEYIPVPPGADFQKGPGPVALPKSGHA

SEQ ID NO: 112084 - protein, 139 aa, Gossypium hirsutum
  Clone ID: uC-gsronu33B160c05b1.pep
MVSPAEPPNHQLHRNLTNLLRTTFSTQATSKTTPSLPPSKISISPLLFADSLLHLTPSPFESTQHDSVSSKSTIKGVSSAESTSGFPSTVRVSGLASSGKRGGPAFVGQVFSMCDLSGTGLMAVSTHFDIPFISKRTPQ

SEQ ID NO: 112085 - protein, 124 aa, Gossypium hirsutum
  Clone ID: uC-gsronu33B160c07b1.pep
LRVREKRSVTWAPNVYDPPPTSLLHMIRNKRQHKLKRNNNDKKKIGRKGLKGTKSTRGNVGRKGVKQIRRSSESSYRWFKELVVEDRVVNEIDNFNVDKPDPYCGSGFLTQSSTGMYYSVAEAL

SEQ ID NO: 112086 - protein, 181 aa, Gossypium hirsutum
  Clone ID: uC-gsronu33B160d09b1.pep
IKSGKTNDKQKDAGEKAGDGDHGPKNNSAEKKPEPAAAKNSGVGGGKGSAKDNQHPKADQMGGKSEEPDPTQITAAGGKKKKKKGQKSNPGPNGDTPPPPSDTQSAMAVALPVPVPAPDHTPPPPPPPNASIDLNPTNQPMYPYTPMYYGPPFCGVSYNTIYPSSSSSYYAPAMHSNPYGP

SEQ ID NO: 112087 - protein, 68 aa, Gossypium hirsutum
  unsure (1)..(68): unsure at all Xaa locations
  Clone ID: uC-gsronu33B160d10b1.pep
MEKRIELEKRGRSPDQIKELNLDNCRSANICGLDDXLSLGSLSMINIGLTSLKGFPKLLDLTRLELSD

SEQ ID NO: 112088 - protein, 111 aa, Gossypium hirsutum
  Clone ID: uC-gsronu33B160e02b1.pep
PGRYPHPPRALLDPPRCVPVFFQGGPLFGRAIWLGLLVPLPTGKKVMSCNVLIIEEIASFPISKVIMLFHLHKIGALKTKTIHEARVSKPRSLKNCPPIFFFFFFFYMVAL

SEQ ID NO: 112089 - protein, 71 aa, Gossypium hirsutum
  Clone ID: uC-gsronu33B160e05b1.pep
PIPLQKYLRYHFFSSPLVFFFYYQCSIFFFIFNKISWLGSSFFKIKCTNSQIIGDSYIVNSGWGKTTNRQN

SEQ ID NO: 112090 - protein, 77 aa, Gossypium hirsutum
  Clone ID: uC-gsronu33B160e12b1.pep
ASHQVTSALPARASTTITDLTCLWCTSDTGITPWSRLLRSTLRCLNQAKKEGGEAISFMFSEFGVLCFQELLKRPKI

SEQ ID NO: 112091 - protein, 93 aa, Gossypium hirsutum
  unsure (1)..(93): unsure at all Xaa locations
  Clone ID: uC-gsronu33B160f02b1.pep
KKVIKKLTXQRVNNSPQSKYNGPTWPKSVNLAQAYTQLHLAQSLGGPKTKRNPSISPPSRAAVKPKASPPPPRAAPLRACISSAHAFGLPLHT

SEQ ID NO: 112092 - protein, 56 aa, Gossypium hirsutum
  Clone ID: uC-gsronu33B160g08b1.pep
NPGDSRGTPGAEPRVRQTPPPFFVVPFFFFFFFVFFRFFFFIFLSFFFFFFFFFIL

SEQ ID NO: 112093 - protein, 49 aa, Gossypium hirsutum
  Clone ID: uC-gsronu33B160g12b1.pep
LLYNIDYINVRLDPPNCVTDCNYLNSVAFFFTFFIIVFCSIYGYCVVKQ

SEQ ID NO: 112094 - protein, 96 aa, Gossypium hirsutum
  Clone ID: uC-gsronu33B160h07b1.pep
KNSQVTCSLKTTDVNVFHQWYALSLSKDTTHLIHSSGVQDNSSNTWIVFLSQNSTLSALSSSTVALNSSAPCLRILSTGNLLNQIGSITCGTASLC

SEQ ID NO: 112095 - protein, 151 aa, Gossypium hirsutum
  unsure (1)..(151): unsure at all Xaa locations
  Clone ID: uC-gsronu33B162b04b2.pep
ENLDASELFPTSDEKNEDEYGEASWIKVNIGQSGFYRVKYGDELDARLRKAIKKGFLSVTDKYGILDDRYALCVACEQSLSSLLLLMDVYRKESDYIILSKVFDVCYNVLEVLRDAIPELTNALXENFINILLWFGQKLGLESTPGESHLT

SEQ ID NO: 112096 - protein, 140 aa, Gossypium hirsutum
  unsure (1)..(140): unsure at all Xaa locations
  Clone ID: uC-gsronu33B162d02b2.pep
MEWVRGDRVGCGSFGTVNLVASKEFSKSPSMAVKSCEAMGSVSLKKEKQVLDQLGICPQVIRCFGDDYTVEKGEKLYNLFLEYANKGSLADHVKKSGGNLIESDVRRYARSILKGLSFVHAKGFAHCDIKLXNILLFDNG

SEQ ID NO: 112097 - protein, 158 aa, Gossypium hirsutum
  Clone ID: uC-gsronu33B162d10b2.pep
MEDQLRSLGILDTCNSDSIVFDGINLEANLPPKKMRAAISSMEPGDAHKLLEDLVKLWQSRSCSGNYVLPWIYSLLLTHGHLMSQESETQMLNSLLKNTKSRGLALQPLLQLSGRLQLVTTQIDKAAQNRSQHFTSDHKMDESEEDDDDDVDDVLYVE

SEQ ID NO: 112098 - protein, 164 aa, Gossypium hirsutum
  unsure (1)..(164): unsure at all Xaa locations
  Clone ID: uC-gsronu33B162e07b2.pep
MALEALNSPTMPTPFTNKYDDIDNWKKGKRSKRLRTDSPTTPTTEEEYLALCLIMLARGSPQGAAHHHPHSSSSSAHPLHLNLSYKCSVCDKAFPSYQALGGHKASHRKPSTAQNPSITTETNAAGSSGRGRSHKCTXCHKSFPTGQALXGHKRCHYEGGNNNS

SEQ ID NO: 112099 - protein, 163 aa, Gossypium hirsutum
  Clone ID: uC-gsronu33B162e11b2.pep
FFIFNASVALGVPVNRLVQAADSVSVCLSKGLGAPVGSVIVGSKSFISKARRLRKTLGGGMRQLGFICAAAFVALKENVAKLEGDHKKAKVLAEGLNQIKGLRVNVAAVETNIIFFDIVEGSKITAEKLYKKLEEHGVLVMLEGPLRMRIVLHHQISSSDVLY

SEQ ID NO: 112100 - protein, 64 aa, Gossypium hirsutum
  Clone ID: uC-gsronu33B162f05b2.pep
LSTNRTKATALPNPAPNTKKRKKKKRKDKEKENIDEEDGFSQEEETKPYLIHLHAFFTELKGSI

SEQ ID NO: 112101 - protein, 150 aa, Gossypium hirsutum
  Clone ID: uC-gsronu33B162f08b2.pep
CCYSLPTVKDQDYLVRGSFPVVETEGAAEFESSFTVSIGSTPLSVVNSSADLVVEGIFRAANSYTDFCLVHGKGDPYISSLELRPFNDSGYLNDKSSNILKVVNRTDLGGFGETRYPEDRYDRIWKPASSFLLTSSQLHLYYSQQCEYNS

SEQ ID NO: 112102 - protein, 108 aa, Gossypium hirsutum
  Clone ID: uC-gsronu33B162f09b2.pep
MAENNGNHGVVLNVNAEANQNPPPSTSKTKDSDVGFTVPFMQKLMAEVLGTYFLIFAGCASVVVNVNNEKVVSLTGISIVWGLAVMVLVYSVGHISGAHFNPAVTIAF

SEQ ID NO: 112103 - protein, 95 aa, Gossypium hirsutum
  Clone ID: uC-gsronu33B162f12b2.pep
DGKDLHISVTMPSIEVGTIGGGTQLASQSACLDLLGVKGASKELAGANSRLLAKIVAGSVLAGELSLMAAIASGQLVQSHMKYNRSTKDVSKVGS

SEQ ID NO: 112104 - protein, 121 aa, Gossypium hirsutum
  unsure (1)..(121): unsure at all Xaa locations
  Clone ID: uC-gsronu33B162h08b2.pep
PTRPVCIFIVCSVVFLWCKKQNAREGNPIQNREIATPVTSQGVSPWFSGAELESLPHQSLVQATKVHFGSRPDFKKTLLDLKESDVGVLXCGPRKMRHDVAKICASGLAQNLHFESISFTL

SEQ ID NO: 112105 - protein, 86 aa, Gossypium hirsutum
  Clone ID: uC-gsronu33B162h12b2.pep
AKFYFWYKSTKVNALKSQFIKKKKKKKKKKKKKKKKKKKKKKKKKKKKKKKKKKKKKKGGGRFKGSNLTSPGLQRKTFLMGALKLN

SEQ ID NO: 112106 - protein, 37 aa, Gossypium hirsutum
  Clone ID: uC-gsronu33B163a04b2.pep
KIMQEMGSDILICRVHPSPLQGLRYDFLLLQAFLKSN

SEQ ID NO: 112107 - protein, 67 aa, Gossypium hirsutum
  Clone ID: uC-gsronu33B163a12b2.pep
QEDYINHDIQGASEANEKGKQCKIESSTYLDHWTLKSMTRSVNFPPMYGTPMRFVGASPCNPSMISV

SEQ ID NO: 112108 - protein, 43 aa, Gossypium hirsutum
  Clone ID: uC-gsronu33B163b03b2.pep
PRKTTFIIIYLFLLFILFSKSSQFEFKYPFLILIRGASSPSDL

SEQ ID NO: 112109 - protein, 155 aa, Gossypium hirsutum
  unsure (1)..(155): unsure at all Xaa locations
  Clone ID: uC-gsronu33B163b10b2.pep
FYASAFLHLFSLYHLPLMDTHLFFFVLLVLPVAYSDDHDLFLECNQTFNCGTIQGIGYPFWSPTLRPSYCGHHGFELICQQNQSPVITINTQRFHVLNMTPPPLMTIAPVDTXEDPCPQQFHNISLNHLFDFAATIRNLTIFYGCPLEDDIPFPH

SEQ ID NO: 112110 - protein, 95 aa, Gossypium hirsutum
  unsure (1)..(95): unsure at all Xaa locations
  Clone ID: uC-gsronu33B163b11b2.pep
IXGCTVIEMFNGRPPWGELEGPQALFKVLNKTPPVPEALSPEGKDFLRCCFQRNPAGRPSATTLLEHPFVRNSADQNGQALMQAFSRMDLTDKSH

SEQ ID NO: 112111 - protein, 38 aa, Gossypium hirsutum
  Clone ID: uC-gsronu33B163c04b2.pep
SAIELVSLDIMAKAGPGAFLSLTEVDFKLPTTNPVSSR

SEQ ID NO: 112112 - protein, 91 aa, Gossypium hirsutum
  Clone ID: uC-gsronu33B163d03b2.pep
LSRPWMGAMIVACTLPVTLVHFPQWGSMFFPPSKDVVKSTEEHYYSSEWNEDEKKKGMHSASLKFAENSRSERGKRVASAPTPPNTTPSHV

SEQ ID NO: 112113 - protein, 63 aa, Gossypium hirsutum
  Clone ID: uC-gsronu33B163d07b2.pep
HFYLIQKQGLHSYHQMSGKNKSYETMRTTFLPLIYVFCLDFVSSKQNGTTEFKLSITNDFKDA

SEQ ID NO: 112114 - protein, 135 aa, Gossypium hirsutum
  unsure (1)..(135): unsure at all Xaa locations
  Clone ID: uC-gsronu33B163d08b2.pep
YIVHVLFAYEVLHSLKMKKSGKKGNXALKLDKSXAYDRVEXDFLAGMITKLGFHADWIVLIMRCVCSISYSVNLNGSNREWFLPSKGRQRDPLSPYLFLICAEGFSTLIKEANQNGLMRGVTIGRERFSINYLFL

SEQ ID NO: 112115 - protein, 161 aa, Gossypium hirsutum
  unsure (1)..(161): unsure at all Xaa locations
  Clone ID: uC-gsronu33B163e11b2.pep
FIQGHTMKLVEVEGSHVVQNLYDSLDVHVGQSLAVLVTLNQPPKDYYIAASTRFSRTVLTATAMLHYANSQTPVSGPLPAAPAFQFHWSMQQARTYRWNLTSNAARPNPQGSFHYGKITTTKTIVLANSASFINGKLRYTVNGVSYVNXDTPSELADYFNI

SEQ ID NO: 112116 - protein, 39 aa, Gossypium hirsutum
  Clone ID: uC-gsronu33B163h01b2.pep
IFLINTDLIVRLTLFMIGEVWCRGVVSLLNQTNPSIISL

SEQ ID NO: 112117 - protein, 71 aa, Gossypium hirsutum
  Clone ID: uC-gsronu33B163h08b2.pep
FHKIYKKKPRLLHNFWSLYRPPSFKEDDDDEVKPLRLNSALSLLNAFCTSSFSSLKRDLFNFCSSRLPRSR

SEQ ID NO: 112118 - protein, 49 aa, Gossypium hirsutum
  Clone ID: uC-gsronu33B164a04b2.pep
MHLIGMSNLQAAYAAAVYQDRPILSKDIFPDLAFIIQSCLLQDPIMTSS

SEQ ID NO: 112119 - protein, 72 aa, Gossypium hirsutum
  Clone ID: uC-gsronu33B164a08b2.pep
FILSGKVPIFPAQVFNIEGNPYLYTKGTDKVDKGSLPNSSKAKLNKSGIFYVITILMVPYYYSHLWDSSFFI

SEQ ID NO: 112120 - protein, 55 aa, Gossypium hirsutum
  Clone ID: uC-gsronu33B164b03b2.pep
PSTSVNSGLGKSTWACKLAGTTNMNNNVSYSIPSTTLPQTSSPSASLAAMVDRKA

SEQ ID NO: 112121 - protein, 63 aa, Gossypium hirsutum
  Clone ID: uC-gsronu33B164d02b2.pep
IGMLNKRSGTSPLRSFESRKLQKQFNHFISKLKKSIKRNNSSCIYVQTLQTRKAWTDSFKLTD

SEQ ID NO: 112122 - protein, 99 aa, Gossypium hirsutum
  Clone ID: uC-gsronu33B164e04b2.pep
VLLYVDGLKGIGPADWVYGMKLSYAVPDTGCGRCTRSGGACGYDTETGVMMCLCSTSMNATRECGSNGDIGSGQKLALRTKFHAFALVVGAFIYFVIFI

SEQ ID NO: 112123 - protein, 165 aa, Gossypium hirsutum
  unsure (1)..(165): unsure at all Xaa locations
  Clone ID: uC-gsronu33B164e06b2.pep
MATVAAPEHHHHHHHPASLEEVRTLWIGDLQFWVDESYLNSCFAHTCELVSIKIIRNKITGLPEGYGFVEFVSHAAAERILQTYNGTPMPGTEQMFRLNWASFGAGERHNDPGPDHSIFVGDLAPDVTDYLLQETFRAHYPSVRGAKVVTDPNTGRSXGYGFVNF

SEQ ID NO: 112124 - protein, 48 aa, Gossypium hirsutum
  Clone ID: uC-gsronu33B164e07b2.pep
GLPYRNSLYRSWYYRYNCVVTEASSVYNVLAQLCVEVHLSKNIVSDLL

SEQ ID NO: 112125 - protein, 158 aa, Gossypium hirsutum
  Clone ID: uC-gsronu33B164e11b2.pep
LSSDLYEEVDIISKGGNYGWRVYEGPYRFNPTSSPGGNTSANSINPIFPVMGYNHSEVNKKIGSASIIGGYFYRSNIDPCMYGRYLYADLYSGAIWAATEDPENSGNFSTSTIRFGCARDSPLQCSSVPGSDLPALGYIFSFGQDNSKDIYLLTSSGV

SEQ ID NO: 112126 - protein, 75 aa, Gossypium hirsutum
  Clone ID: uC-gsronu33B164g09b2.pep
FYGSSLKWTLSHQSAVSSLRVDFTSIFDDLCLFDYCSGFFFIYIYIYIIHFCINKSDLVRDAVLYSTLFVYCGYF

SEQ ID NO: 112127 - protein, 161 aa, Gossypium hirsutum
  Clone ID: uC-gsronu33B164g10b2.pep
HASAFTTEPSTAPFTPPPESVHLTTPSSPEVPFAQFLGPNLHYGEAGQRFPIYQYEFQSYQLHPGSPIGQLISPSSGISGSGTSSPFPDGDFASGLRFPEFRMGDPPKLLNLDKLSNREWGSSHGSGTLTPDATTSTPRNGLRLDHPLSEIVSHPSLDKQN

SEQ ID NO: 112128 - protein, 152 aa, Gossypium hirsutum
  Clone ID: uC-gsronu33B166a01b2.pep
PRLLYFVEKIIKAKLVMNFAIIMQGASILYEGGEDLEEDMVVIYAADLEKALSELTSPGTSGSVHTEEDLLQEFSCSINIKHREDFDEEKEPDGMLLSGWVEAPVDTDNNKPIGNDESTSNALPSMETLDGAKDDDIQDTSEVAEAFAGKKR

SEQ ID NO: 112129 - protein, 115 aa, Gossypium hirsutum
  Clone ID: uC-gsronu33B166b06b2.pep
ADSAFRKLVLLFVFRLCRSPRVGCSVFVCTLSWAWPKGLRSVCWFCGVLRFGSALVASPFSWLLAWGRPRLVLVWVVWAYQAFVLRWQSLLFLHGSVCFFFRQKKNKKNKPNTLV

SEQ ID NO: 112130 - protein, 60 aa, Gossypium hirsutum
  unsure (1)..(60): unsure at all Xaa locations
  Clone ID: uC-gsronu33B166b08b2.pep
LFXXIFLFFSAIKPDFNLCNRVRTFTNENIRKQYKATKEKGDLQVCLSVCFSSHFLTTLA

SEQ ID NO: 112131 - protein, 58 aa, Gossypium hirsutum
  Clone ID: uC-gsronu33B166c06b2.pep
NRGPQKKNNGGQRRGRKPGNLKRAPPYFFFFFFFFFFFFLYNFFFYLIFFFFFFFFFF

SEQ ID NO: 112132 - protein, 99 aa, Gossypium hirsutum
  Clone ID: uC-gsronu33B166c11b2.pep
FFCSASHGQISTVATLYPLIYAPWHFKFPGGLLICFAVYNTPNIHNDMASLLETVCRRGLYAIVNNHDSEPVFIHRHACNRLWLLPVLVDVETLIRTRR

SEQ ID NO: 112133 - protein, 174 aa, Gossypium hirsutum
  Clone ID: uC-gsronu33B166d04b2.pep
NCLLRTLRQRDFRSKVFDCREAPDMTVQCYLERIFRYTKAGPSVYVVAYVYIDRFCEANPGFRITARNVHRLLITTMMVASKYVEDMNYRNSYFARVGGLTTKELNKLEVELLFWMGYKLHVNVSVFESYCSHLEREVSIGGGYHIERTIRCAEEIKSRQREAQGYTINCSHFV

SEQ ID NO: 112134 - protein, 136 aa, Gossypium hirsutum
  Clone ID: uC-gsronu33B166d08b2.pep
YVSAHASARIFGGKETSANTNRVVGTYGYMSPEYALDGLFSFKSDVFSFGVVVIEIISGKRNTGFYQPEQSLSLLGYAWHMWKTGKAMDLLDQALRESCKADELLKCLNVGLLCVQEDPGDRPTMSQVVFMLGSEN

SEQ ID NO: 112135 - protein, 55 aa, Gossypium hirsutum
  Clone ID: uC-gsronu33B166d09b2.pep
PSKEEVERCFLFKGCPPFFFFFFFFFFFFFFFFFFFFFFFFFFFFEYPNLDQKLV

SEQ ID NO: 112136 - protein, 68 aa, Gossypium hirsutum
  Clone ID: uC-gsronu33B166e03b2.pep
RHVCFTGSGMGDIPGLLLWTESGMLSRITKSISMAVGNPTGDFTCLLSMELIRKESSQLLRRSRIGHI

SEQ ID NO: 112137 - protein, 92 aa, Gossypium hirsutum
  Clone ID: uC-gsronu33B166e06b2.pep
HASCQKKKKKKKKKNLIKRVAGVAASRFPPLACGVVRPFLCLVAPLHWPLVSNFYTGNSGKPPVFLAFQLFALSPFGVLGIWPDAPALSIFC

SEQ ID NO: 112138 - protein, 42 aa, Gossypium hirsutum
  Clone ID: uC-gsronu33B166f03b2.pep
LVHCLFFGSIPPSLYLQQHLMIACMTLVLTVDNDPMISNSEL

SEQ ID NO: 112139 - protein, 43 aa, Gossypium hirsutum
  Clone ID: uC-gsronu33B166f09b2.pep
MFNKDSDFKNRFFFLVFFFFFFFFFFIYFFFFLFVFFFFFFRT

SEQ ID NO: 112140 - protein, 107 aa, Gossypium hirsutum
  unsure (1)..(107): unsure at all Xaa locations
  Clone ID: uC-gsronu33B166h01b2.pep
PRFLSAMVSLSLKNPQDIWSLVENSRVFLEALRLFFLKRXKKDIRNLTFDKDDQMAVEFVTGGANIRASSFGNPLHSLFEAKGIAGNIVHAGATTNAIITGLIAIEA

SEQ ID NO: 112141 - protein, 79 aa, Gossypium hirsutum
  Clone ID: uC-gsronu33B166h10b2.pep
FKELLIFFVIRFFVYLYVLVLLILDQPGLSFMGFGSRSLVFGVSTPLLLVLQRLLLRFLRHWSSASWLFIYLLSIPGVE

SEQ ID NO: 112142 - protein, 65 aa, Gossypium hirsutum
  Clone ID: uC-gsronu33B167a03b1.pep
KKRAMNSVQWGYVRIITGTIFGGIVGFYVMHRVELSYKEKMKERLRQYELELKRKEKLDELEDSI

SEQ ID NO: 112143 - protein, 160 aa, Gossypium hirsutum
  Clone ID: uC-gsronu33B167a04b1.pep
NMRPIGCFPQILTSFPSAKKDSVGCAKPYNRLAQRFNAELKNALARLRIEFPLATIVYVDLYSALYSLYTHPTKNGFERPLVACCGYGGKYNYGRDAACGETINVNGKNIMVGSCKDPSVRVSWDGVHFTEAANKFAFDLVSSKNFSNPPIPLKLACHHR

SEQ ID NO: 112144 - protein, 53 aa, Gossypium hirsutum
  Clone ID: uC-gsronu33B167b01b1.pep
KVIKSLNSSTYCITDSDWMLTNTIITLQQHYRVENSCKVMLIAERIEVPVSKF

SEQ ID NO: 112145 - protein, 66 aa, Gossypium hirsutum
  Clone ID: uC-gsronu33B167b10b1.pep
AFVAEIILPVELLLMLLLPPPLLLLLPQLTYSFFFIYVLLILFFSFSSFNSSFIYMIMRYISGGSL

SEQ ID NO: 112146 - protein, 76 aa, Gossypium hirsutum
  Clone ID: uC-gsronu33B167d06b1.pep
KKNKLCQHRGEKLDSLKRAPPIFFIFIYLFFYFFLFFIYFLYIYYFIFNLFIFFFLLFFFWQNHNIFCFQNIHGVV

SEQ ID NO: 112147 - protein, 90 aa, Gossypium hirsutum
  Clone ID: uC-gsronu33B167d09b1.pep
CFSYEKAQKFRVAPLNGAICHATVLVFHLQKSPHMPTAVQNIYVLVLIQTGRPIIPDLRQFDTAHRRGLFQTMRLIGLAHLLTSQTAIKL

SEQ ID NO: 112148 - protein, 114 aa, Gossypium hirsutum
  unsure (1)..(114): unsure at all Xaa locations
  Clone ID: uC-gsronu33B167d11b1.pep
ELTVYLYIQAPPKGFGLGSIGHKPNQADGLALCRGNVSTTDRKTCAXKQAMKYDXRCPYNISAIVCDDNCLFKYSNMEXLGQMDNPNMFYKWNLHNESVRQALNAETIELVSEL

SEQ ID NO: 112149 - protein, 138 aa, Gossypium hirsutum
  Clone ID: uC-gsronu33B167f02b1.pep
KTKKKKKKRKKLIKKKKKKTYKKEKDDVGVPYCLFIWLIWGGAVLGVPFFVPLVGPLLLFFGGPQIVFPGRGFSTSGWGKPWGSPTLFPLGTSPFSPLGFIRKGPPPSPFPTFGPLYWGVGRPLFGPFNAGGWGCVPP

SEQ ID NO: 112150 - protein, 92 aa, Gossypium hirsutum
  Clone ID: uC-gsronu33B167g05b1.pep
FGYNQGFPVSAFLTAAQEFNFGCPIKKFFPCQTGVGKLGSLKRPPLFFFFFFFFFFFFFFFFFFFFFPFYFFFFFFFFFFFFFSSKEGKTPR

SEQ ID NO: 112151 - protein, 101 aa, Gossypium hirsutum
  Clone ID: uC-gsronu33B167h01b1.pep
PLVREFGDSSPMFTALATIALINLVCLIGLMKKAIVNEGIPIIYETMLLQFVLCAILVLINWPLYQGLFFRKDNGKMPNYIAIKSIVLAVSSCTCFTLFST

SEQ ID NO: 112152 - protein, 55 aa, Gossypium hirsutum
  Clone ID: uC-gsronu33B168a04b1.pep
QKKTNTLQGRGRKPWSFKTAPPFFFFFFFSFFFFFFLFFFLKPQFNINPFHNPGI

SEQ ID NO: 112153 - protein, 44 aa, Gossypium hirsutum
  Clone ID: uC-gsronu33B168a12b1.pep
GFSKLSFPNHWKGKNGLYCVGLSRRGLYGAASDALNIADDINST

SEQ ID NO: 112154 - protein, 103 aa, Gossypium hirsutum
  unsure (1)..(103): unsure at all Xaa locations
  Clone ID: uC-gsronu33B168b05b1.pep
MGKISQSYTIVISFNFLLGGSWSILVHFQLRVHFHLYSQARRTKFRYGFRFLLSGFQVRRLVFKSSENGKRKKKFKKRDKICFIGYSIFSSMSMPXNTSRSNS

SEQ ID NO: 112155 - protein, 39 aa, Gossypium hirsutum
  Clone ID: uC-gsronu33B168b11b1.pep
ATWKFIDYFIFSLNRRDKFSMFLTRNVFLCIFNTIEEVY

SEQ ID NO: 112156 - protein, 109 aa, Gossypium hirsutum
  Clone ID: uC-gsronu33B168c06b1.pep
PLFPVFLDSYLGGEGHTGLSFFLFNFIVSKVKKMYFLTWLYSALYLSKKKKKKKKKKKKKKKKKKKKKKKKKKKKKKKKKKKKGGALLRDPSLLPRACNVKLFFWGPLN

SEQ ID NO: 112157 - protein, 68 aa, Gossypium hirsutum
  Clone ID: uC-gsronu33B168c12b1.pep
YRGARFKGTRLPSATLRLDNPCMVPPKFNSLAILLQPGDGKTPRVTQINRLNTHAPLTGWGTSQEAAP

SEQ ID NO: 112158 - protein, 126 aa, Gossypium hirsutum
  Clone ID: uC-gsronu33B168d04b1.pep
MDSNVKELATEVLPYIRVYKDGSVDRLVDSPIVPPCNEDPETGVSSKDIVVSKSPPISARIYLPKHVEQSPKVPLLVYFHGGGFCFESAFSFVETKYMNRLAKQANVVVISIEYRLAPGHPLPIVM

SEQ ID NO: 112159 - protein, 70 aa, Gossypium hirsutum
  Clone ID: uC-gsronu33B168e08b1.pep
RAEHKAQETERVPLTIKAEQLKKERTERAYTGETPAGKRGDVGQNRGRWEQTRVSQSRRCKTAGKGMKSR

SEQ ID NO: 112160 - protein, 114 aa, Gossypium hirsutum
  Clone ID: uC-gsronu33B168e09b1.pep
MSTMKFCRECNNILYPKEDREQKILLYACRNCDHQEVAENNCVYRNEVHHSAGERTQILQDVAADPTLPRTKAVICANCKHGEAVFFQATARGEEGMTLFFVCCNPNCGHRWRD

SEQ ID NO: 112161 - protein, 112 aa, Gossypium hirsutum
  Clone ID: uC-gsronu33B168e11b1.pep
GFLLIYPKESILFNSMEHYHCTTRKFVKKGVQEKLGWRGKPCISPQLNCYFHGKVTHSYISFNTWSDTRLYITAHSMLRSNGSNPFAFSCSSCSGGGGGCCCSSGRCGWTCT

SEQ ID NO: 112162 - protein, 60 aa, Gossypium hirsutum
  Clone ID: uC-gsronu33B168g06b1.pep
LHYQFMEFKSEKRKCKYVGNGKNKPIIDTIRITENCLCIYSTPFQVTPPHKSSHPGRKKG

SEQ ID NO: 112163 - protein, 181 aa, Gossypium hirsutum
  Clone ID: uC-gsronu33B168h05b1.pep
LAEPLKQLSETPDTFEDFVSENLKEFQDWSEYYSCDATYRNWLKIELANAEVSPDELSVEEKQRAIMAAKETLDLSFLLLLRERNPWLISWVEHISESMEPLFLELHSTAMLRLPSGESMCPDATVCAALMSALYSSATEEVVSERQLTVNVAISSKDSYSIEVMLRCLAVEGDGIGPHIL

SEQ ID NO: 112164 - protein, 55 aa, Gossypium hirsutum
  Clone ID: uC-gsronu33B168h11b1.pep
LCVRVEEGAIGGKLLCAHGDARLGYFNWSGIQCSCGSWITPAFQLHKSRVDISTV

SEQ ID NO: 112165 - protein, 74 aa, Gossypium hirsutum
  Clone ID: uC-gsronu33B169a01b1.pep
LKLKTWFIFIHCNVQMFNNMQKIYIYSLMTASSLSKQIHISPKTSHRNSNLSTNKFIKQVKRKITSREKDNQDK

SEQ ID NO: 112166 - protein, 124 aa, Gossypium hirsutum
  Clone ID: uC-gsronu33B169a04b1.pep
ILIERIQASLSAMEEKKTIIYMGDGLGDFCPSLKLGDGDYMLPRKDFPVWDLVCKNRSLIKAEVCEWSNGEEFEHALLHFITKITIDKSNTNGNNAAQLYSDCKVQTMPGSSHQAFSQTLYVPH

SEQ ID NO: 112167 - protein, 158 aa, Gossypium hirsutum
  Clone ID: uC-gsronu33B169a07b1.pep
MGLPRKSPSLLSVSLVSITIFLGSFPFVATAADYTNLVFKGCADQKFQDPSGLYLQNLKNLMQDLVSQSSQRTFSTAASGEDPNAINGLYQCRGDLSTSQCYSCVSKIPKISDKVCGKAVAARVQLSGCYLRYEISGFKQVPETEFLYKVCGSSSSGR

SEQ ID NO: 112168 - protein, 63 aa, Gossypium hirsutum
  Clone ID: uC-gsronu33B169b06b1.pep
SGMVPNVSPFLKLTSVMVCCNVWFSRKNCPSTIEAVKNYVDSVTVLSKLECNGLMPFFCFIKL

SEQ ID NO: 112169 - protein, 154 aa, Gossypium hirsutum
  Clone ID: uC-gsronu33B169b09b1.pep
MVCLVSRTGRHLQRYNALGRRQVVGCIPYRYKRNSDGTLSTDLEVLVISSQKCQKMMFPKGGWELDESKEQAALRESVEEAGVRGNVECELGKWDFMSKRYGTFYEGYMFPLLVKEELALWPEQNVRQRTWMSVKEARDVCQHWWMKEAFDILV

SEQ ID NO: 112170 - protein, 112 aa, Gossypium hirsutum
  unsure (1)..(112): unsure at all Xaa locations
  Clone ID: uC-gsronu33B169b10b1.pep
DGRACEADTIASGGLIVSDRKWENIDYMGKNMYXRRAVTVDDTEVXTDMVSSKMQVHSYHTSRESSGVTKGTLLKRHHXNYQGYGLAALGLGGVQVTEPQLHTIYPHGLTDT

SEQ ID NO: 112171 - protein, 76 aa, Gossypium hirsutum
  Clone ID: uC-gsronu33B169c06b1.pep
MGFWTLVEGLLLFANALAILNEDRFLGPRRWTLAEFQGGRNTLKGQIVGLIHACQFLRLPLILFNIITIVVKLVSG

SEQ ID NO: 112172 - protein, 141 aa, Gossypium hirsutum
  Clone ID: uC-gsronu33B169d07b1.pep
MLKQILSKLPRKSQKSDSLDSAGLDSGNHTSNSSNGVQCTNIGNSITSRLSVVKRVSSAVFPASIMAGVEAVEPNLSFKDVSNPQKQNLFISKLNLCCEVSDFSDPKKASSEQDLKRQTLIELVDFVFSGSAKFNEQQWLQ

SEQ ID NO: 112173 - protein, 163 aa, Gossypium hirsutum
  unsure (1)..(163): unsure at all Xaa locations
  Clone ID: uC-gsronu33B169f07b1.pep
LPGPTRPAKIARKGKAPLINHSIFPPPPPAISLKYYLFTLSKRTQINGARFQVEQRSFNSQFLRSISYKRGSLQLLDQRKLPLETVYLDIQDATDXWNAIRDMVVRGVPAIAIAAAFSLAVEVANFKDFNGTSEEAASFIELKLEYLVSSRPTAVNLSDAAKS

SEQ ID NO: 112174 - protein, 47 aa, Gossypium hirsutum
  Clone ID: uC-gsronu33B169g06b1.pep
NGCMLFKYIKSIGILAFYFPASKIHSVIDAGKLYMFNNFLLIYIILK

SEQ ID NO: 112175 - protein, 49 aa, Gossypium hirsutum
  Clone ID: uC-gsronu33B169h04b1.pep
LVYRLLQLFKYVPREQLTIPDFVFQHDIEVNGGKGLIVDPRTKYIYHRP

SEQ ID NO: 112176 - protein, 81 aa, Gossypium hirsutum
  Clone ID: uC-gsronu33B170a01b1.pep
KILITIFSVTKTRQRSPIWSELGLSLKKRVHGSGKNFQFHQKNNKLGAVLNIRSRPSKKESEGGISVKKKEREREREEEAY

SEQ ID NO: 112177 - protein, 126 aa, Gossypium hirsutum
  Clone ID: uC-gsronu33B170a12b1.pep
MRQTLSSSFVTPLFLCIFFFFVSISTSHGLTATNDSLIRKTCKKCAQSDPNLSYNFCVTSLQAAPHSHYANDLRQLGKISITLLGRNVTNTRSHIKELLKNQKKMDPFVRSCLHDCFDLYSDAIPT

SEQ ID NO: 112178 - protein, 95 aa, Gossypium hirsutum
  Clone ID: uC-gsronu33B170b01b1.pep
SSRSINLIRPLSSIPIQDNFPQEHDSQLFTHLHEHNESLDQVHPLSCLQSSDPAIVEYSRSIAFSFIYRLCKKGAYAYRHYAAFNSSLILINMPQ

SEQ ID NO: 112179 - protein, 54 aa, Gossypium hirsutum
  unsure (1)..(54): unsure at all Xaa locations
  Clone ID: uC-gsronu33B170b05b1.pep
GSFWQPAEPTHDRSCSMVMHEPCLYGRVSSYSGILMIISPPFERXPGSQVLITR

SEQ ID NO: 112180 - protein, 125 aa, Gossypium hirsutum
  unsure (1)..(125): unsure at all Xaa locations
  Clone ID: uC-gsronu33B170b11b1.pep
MDAAKWSQDFGLVKPMEEMLSNTCTRGPMLERKTRPPEQLNCPRCNFTNTKFWYYNNYSLTXPRYFCKTCRRYWTEGGSLKNVSSGGGFRKNRRSLLSSPSSSSSSSSSSASAKVSGELKPTSFL

SEQ ID NO: 112181 - protein, 57 aa, Gossypium hirsutum
  Clone ID: uC-gsronu33B170c10b1.pep
SFFFKTLKLSLSVGAAQQFIAPFKGSPNHAFNSDDNRGRAIGPNVRYALSLLLLLSL

SEQ ID NO: 112182 - protein, 62 aa, Gossypium hirsutum
  unsure (1)..(62): unsure at all Xaa locations
  Clone ID: uC-gsronu33B170e10b1.pep
IRCPYIIVISLHARVFYSWFPFFRSPFFFFFFFFFFFFFFFFFFXQKDLSKPFNFKSKRTRG

SEQ ID NO: 112183 - protein, 146 aa, Gossypium hirsutum
  Clone ID: uC-gsronu33B170f01b1.pep
DYLEKPDKSCFLHSALYPGDYGIPKEEIIEYWIEGLPDEMESREEMNSREETKSKGNACLERILDSSLLQGTNGKNIVMMREIVRGMALSLIPKDRRFFVKAGMKLNELPNELELEEAVDMEKVSLMENFISKIPPKMSPKRKKLT

SEQ ID NO: 112184 - protein, 177 aa, Gossypium hirsutum
  Clone ID: uC-gsronu33B170f09b1.pep
FHPLFQFFYFDSVESLPTEPLDPSDLKPLNTRYDAQISVFGSKLQKKLEDAKVFIVGSGALGCEFLKNIALMGVSCGDQGKLTVTDDDVIEKSNLSRQFLFRDWNIGQAKSTVAASAAASINSRLNIEALQNRVGPETENVFDDTFWENLTVIINALDKCNARLYIDQRCLYFQKPL

SEQ ID NO: 112185 - protein, 134 aa, Gossypium hirsutum
  unsure (1)..(134): unsure at all Xaa locations
  Clone ID: uC-gsronu33B170h02b1.pep
MILADYGNILTDITSDWPPLAKSSLPEICFYSHVSNESPTLPISDRISRLILVLXCNINSKAKYYKDVVSYLFLANNLQYVISRIHKSNLHHLLSKEWITKHEAKVNQLATSXKRFAWSNVLASLPENPTAPMI

SEQ ID NO: 112186 - protein, 37 aa, Gossypium hirsutum
  unsure (1)..(37): unsure at all Xaa locations
  Clone ID: uC-gsronu33B170h03b1.pep
IYYLFIFFFFNFFFFFFFFFFLXGIILLIITHIYRKD

SEQ ID NO: 112187 - protein, 152 aa, Gossypium hirsutum
  Clone ID: uC-gsronu33B170h05b1.pep
HSSGRDQDLIRDASKLTFLNVNEFKLSQQDLIQHSNKFTNSKAAGCRKADLESQPQIKSSNQGSSHGCNLKLPLALPLPKAPSESWLKRTLPAVSSRNSSSRTALGTCNYSETQAYTALSSDLKWENIVKSSNVHHGRLRFSEEQLPPIPEA

SEQ ID NO: 112188 - protein, 83 aa, Gossypium hirsutum
  Clone ID: uC-gsronu33B171a01b1.pep
MEEWRVPTTWAKANQARNTATSESVAIKVIDKEKVMKAGLIDQIQREISVMKLVRHPNIGQLYEVMATKTKIYFVLEHVKGGE

SEQ ID NO: 112189 - protein, 79 aa, Gossypium hirsutum
  Clone ID: uC-gsronu33B171a09b1.pep
LLQVNITLHRLTLLTLVQKIDTFFCSVCLDTFFCSVCLFFWGVSSETRLREKQVNSFEVLVHNVGFHYFNGEKPPRSHC

SEQ ID NO: 112190 - protein, 60 aa, Gossypium hirsutum
  Clone ID: uC-gsronu33B171a11b1.pep
LFLACETAYTKLFEMFLLVVKTMNDRRFVSTYVIISPFFGVFHFLPMVICLEKKNLALET

SEQ ID NO: 112191 - protein, 85 aa, Gossypium hirsutum
  Clone ID: uC-gsronu33B171b01b1.pep
GCVPPRVRGNSVLVMIETALRRQQYNLLNALFMLLKYCKSWFVFHVHLFFHQLTDGQSIEVDVVKCHDQDLISKHMNVLPDLLIA

SEQ ID NO: 112192 - protein, 117 aa, Gossypium hirsutum
  unsure (1)..(117): unsure at all Xaa locations
  Clone ID: uC-gsronu33B171d12b1.pep
YSDRFSGQLVATXLESGVSLGSGEYFIDVFIGTPPKHFSLILDTGSDLNWIQCVPCYDCFEQTGPYYDPNESSSYRNISCQDPRCNLVSPPDPPLPCKTENQTCPYYYWYGDSSNTT

SEQ ID NO: 112193 - protein, 86 aa, Gossypium hirsutum
  Clone ID: uC-gsronu33B171f07b1.pep
IPWCNVCSNTRESPTCPLQGEAWVRHLSNGIAVPPTCNLCASRVLRLPVPKTSLRARWRVSRGTCCAGLARGTRRHRRRGRGSCWR

SEQ ID NO: 112194 - protein, 65 aa, Gossypium hirsutum
  Clone ID: uC-gsronu33B172b01b1.pep
EQRIKSQHFLYFLHFKYEPFNGDKLSIFHCQLKTMYSRLGCVITSFLSFMKSFHYWMCLFFLFLR

SEQ ID NO: 112195 - protein, 65 aa, Gossypium hirsutum
  Clone ID: uC-gsronu33B172b02b1.pep
GAGRVLVVRAVLVRVFPSSLASFSASRCAPPRFCFVPLPLFLRRFGLGAESFFGRVGRPGFSGPG

SEQ ID NO: 112196 - protein, 91 aa, Gossypium hirsutum
  Clone ID: uC-gsronu33B172c03b1.pep
VIVGYGVLGYQNNSPIPPNHMAVLGPGNGLSVWNRSSKPLRFVLIAGQPLNEPAVQHGPFVMNTQAEIDQTIEDYHYSKNGFEMAKHWRSH

SEQ ID NO: 112197 - protein, 102 aa, Gossypium hirsutum
  Clone ID: uC-gsronu33B172d09b1.pep
MSTGDVKRVSRQDIQLVQNLIERCLQLYMTQKEVVETLLAQAKIEPGFTELVLQKLEEENREFFQAYYLRLMVKQQIVEFNELLEPQVRLMSQIRTAGVSSI

SEQ ID NO: 112198 - protein, 58 aa, Gossypium hirsutum
  Clone ID: uC-gsronu33B172d11b1.pep
FVLSRCSLSHSSTLRICNCTYEANCEMNKNQNALQYLVLGVDKRLLSNRETQEILMSS

SEQ ID NO: 112199 - protein, 178 aa, Gossypium hirsutum
  Clone ID: uC-gsronu33B178a01b1.pep
LSLVKLYGCTSRRSLELLLVYEYIPNGTVADHLHGKRSNSGLLTWHVRLRIAFETATALAFLHGKEVIHRDVKSNNILLDKNFHVKVADFGLSRLFPNDVTHVSTAPQGTPGYVDPEYHQCYHLTEKSDVYSFGVVLVELISAKKAVDISRHRHDINLANMAISRIQNQALHELVDPS

SEQ ID NO: 112200 - protein, 70 aa, Gossypium hirsutum
  Clone ID: uC-gsronu33B178c04b1.pep
FFGGGKSTGFGGIYDSVEKAKKYEPKYRLIRNGLDTKVEKSRKQMKERKNRAKKVRGVKKTKAGEAAKKK

SEQ ID NO: 112201 - protein, 45 aa, Gossypium hirsutum
  Clone ID: uC-gsronu33B178c10b1.pep
FLLLYFFFFFFFFFLFFFFFFFFFFFFFFFFFFFYIFFFFFFFFF

SEQ ID NO: 112202 - protein, 178 aa, Gossypium hirsutum
  Clone ID: uC-gsronu33B178g05b1.pep
DLFEAIPGVPKSKEMYNPATWMLEVSSIAAEVRLGIDFAEQYKSSSLYQRNKALVNELSTPPPGAKDLYFATQYSQNTLGQFKSCFWKQWWTYWRSPDYNLVRYFFTLITALLVGSIFWQVGTERSSASDLTMIIGAMYAAVVFVGINNCSTVQPVIAIERTVFYRERAAGMYSALPY

SEQ ID NO: 112203 - protein, 71 aa, Gossypium hirsutum
  Clone ID: uC-gsronu33B178g07b1.pep
GSILQVLFLLRQGTEGINLLSSSSPNQSKSIAGLRRWIFVYMSFSMIQLSALVWCPTSDVLASLGMSVHGC

SEQ ID NO: 112204 - protein, 81 aa, Gossypium hirsutum
  Clone ID: uC-gsronu33B178h02b1.pep
NQGRYYLTMFFNAKSCKNNHMGRVYCNSTESNSISAIQIFLVLTAKREINKTAKLKLLHHHHPPSFWSPLSHRRIEILSCF

SEQ ID NO: 112205 - protein, 115 aa, Gossypium hirsutum
  Clone ID: uC-gsronu33B178h05b1.pep
INHIYELEENHAWQYPLHIHIYIYIYIYINDQFLGLEHHLAFYRNHCNHNHLGCLALHLGNLAPSPIPFLFLLLWVSPSSSQHLPWIVSLSSSSIEAITMQNPAKNWVFSPLSSP

SEQ ID NO: 112206 - protein, 125 aa, Gossypium hirsutum
  unsure (1)..(125): unsure at all Xaa locations
  Clone ID: uC-gsronu33B179a01b1.pep
ASINNQNWSGTCYITLXIGAFLADSYLGRYWTIACFSIIYIIGMTLLAMSASVDGMKPFCYSKDNCNPTDTQSAMTFLALYLIALGTGGIKPCVSSYGADQFDDTDXGSRFTRVHFFNWFYFSIN

SEQ ID NO: 112207 - protein, 147 aa, Gossypium hirsutum
  Clone ID: uC-gsronu33B179a09b1.pep
VLRPFLLRRLKSDVENGLPSKKETILKVGMSQMQKQYYRALLQKDLEVVNAGGERKRLLNIAMQLRKCCSHPYLFQGAEPGPPYTTGDHLVTSAGKMVLLDKLLPKLKERDSRVLIFSQMTRLLDILEDYLMFRGYQYCGIDGNTGG

SEQ ID NO: 112208 - protein, 177 aa, Gossypium hirsutum
  unsure (1)..(177): unsure at all Xaa locations
  Clone ID: uC-gsronu33B179b10b1.pep
LLAKGKAGESNPDTGLGLGESGNWLPGSPRVLSLLSSVLERSVRGNEKLLAGSKIKDVITIFHGSRAPSLNLRQYVERIFKYCKCSNSCFVVAVIYIDRFLQRIDAYLTSLSVHRLLITSVMVAAKFMDDQHYNNAYYAKVGGISREEMNRLEMRFLFDLDXQLNVTTXVFNXYWLM

SEQ ID NO: 112209 - protein, 42 aa, Gossypium hirsutum
  Clone ID: uC-gsronu33B179c09b1.pep
VAGTGFFYVKRKSAKKVAEKLEFRKYDPRVNRHVLFTEQKMK

SEQ ID NO: 112210 - protein, 142 aa, Gossypium hirsutum
  Clone ID: uC-gsronu33B179d05b1.pep
MAQGLKPSSDASSRSVLNSTGNIRSQGKCSAENKIKSQDAHVETLKILEEEMAELTTKGSRTSSPNRRFSFSLTRLSRSFSFKESSAVPQMNPGYVSVKSGPVRSDSSGFLDDMNRDKLNGHTRTRSSPLRRVLDPLLKSRG

SEQ ID NO: 112211 - protein, 136 aa, Gossypium hirsutum
  unsure (1)..(136): unsure at all Xaa locations
  Clone ID: uC-gsronu33B179d07b1.pep
MVKLLMCTMAVIGLQGRFAERIVVIARSLDDGTRDLPYGHWSYAGLKKXTSRDIHTDSDKKTAKKLXRTGLVRLVNYQQLMPTRYTLDGDSKDVATVHALQTKDMKVALCKATNERTAESIKTGKNRXWFYTKLRY

SEQ ID NO: 112212 - protein, 45 aa, Gossypium hirsutum
  Clone ID: uC-gsronu33B179e01b1.pep
LMINSSSQATVTSQTSTNALFKVLLLKLSVIPKTTSILWDRFLNP

SEQ ID NO: 112213 - protein, 173 aa, Gossypium hirsutum
  unsure (1)..(173): unsure at all Xaa locations
  Clone ID: uC-gsronu33B179e04b1.pep
FLSAHASAVLQRIATIASGGKKGIPHETRNTFLVVTVLIITATYTATLNPPKQPDTISNSQNFHLTYDISLGSTSTGPVPSPPPAEEKKIENILDVSTMFWLYNTLTFWATTVLTAYLLPSPSMSLFILITLFLFGTCYMLLVAGSIRTLALQYXFYLSTPGSRSYSKLSTTN

SEQ ID NO: 112214 - protein, 185 aa, Gossypium hirsutum
  unsure (1)..(185): unsure at all Xaa locations
  Clone ID: uC-gsronu33B179e12b1.pep
EKNNDFYAVXGVEKECTQTELRTAYKKLALRWHPDRCSASANSKFVEQAKKKFQAIQQAYSVLSDANKRFLYDVGVYDSDDDENGMGDFLNEMTAMMSSENGEESFEELQELFEKMFQADIDSLDCSGQSPTSCSASSSFASYGDSSGSNNRSSSEMSSGETMPENIDTRLNHIFLGTDGKHRRH

SEQ ID NO: 112215 - protein, 135 aa, Gossypium hirsutum
  Clone ID: uC-gsronu33B179g08b1.pep
FRTALEAGLNPCQGPTSLPEKIDEKTKEDLKDIARSEADVRNLNKRVNELGTQLNHQPEQKSVSMSDSCTQREPNHQTKMKDKTKGAEAPMRSRSKKEMKVDKAEGEKGKKQESSMANRHRKSGSAGNGCGHSRI

SEQ ID NO: 112216 - protein, 118 aa, Gossypium hirsutum
  Clone ID: uC-gsronu33B179g09b1.pep
VATRPLIGDVVTALSYLANQAYDPNTTGNGHRGSGETDEKRYRDDRGGRVSKNDEGGVSGRKGDLEGSEKENSPRETARMLNRDLDRERAVAEAKMWGENWREKRRQSAQGSSDGSNG

SEQ ID NO: 112217 - protein, 51 aa, Gossypium hirsutum
  unsure (1)..(51): unsure at all Xaa locations
  Clone ID: uC-gsronu33B179h11b1.pep
MASAQDVTGAGATFPAPVYAKWADAYNKATRAKVNYPXVGSGAGLKQKKSK

SEQ ID NO: 112218 - protein, 46 aa, Gossypium hirsutum
  Clone ID: uC-gsflmaxxa002a08b1.pep
VNLQIAEPPPFLTLGIRPLDHSFKFSIQFSLIISLLPLNLMMLQFF

SEQ ID NO: 112219 - protein, 143 aa, Gossypium hirsutum
  Clone ID: uC-gsflmaxxa002b11b1.pep
ILSSCRIKQWLQKTLNGDNTSEEGHIDNGLYSSTSNDNLDEGFRHFQTRWAKGEPVIVKNTLANSSGLSWEPMVMWRALCEKLEMPEVKAIDCLAGCEVEINTQQFFKGYTEGRAYNNLWPEMLKLKDWPPSDKFEDLLPRHC

SEQ ID NO: 112220 - protein, 27 aa, Gossypium hirsutum
  Clone ID: uC-gsflmaxxa002d03b1.pep
RTCYLSFKSYHSSEALVLAKHMMNDKI

SEQ ID NO: 112221 - protein, 165 aa, Gossypium hirsutum
  Clone ID: uC-gsflmaxxa002d05b1.pep
MRKLARQCRNSEDDKFSLPTVDDARPMDINEQEELVRSLEKMQAHQSLQWKSVFAALLFCYSAFLLYSIYQQTLFPWELRYHAYFMEDVDSWIIITADWLAVLACSMAIMGLFNNSKDHIKWIWYSCSIGLVLAIFWVYYMLRMPKFRWDVIWLPLGPLCGAGVC

SEQ ID NO: 112222 - protein, 163 aa, Gossypium hirsutum
  unsure (1)..(163): unsure at all Xaa locations
  Clone ID: uC-gsflmaxxa002d06b1.pep
MAGWFGSQSYTVATMTVTSTPSPDLAFTNLAYCSPSDLQSFAVPGSRLFLVNVGDAFVLSISPHESIRSKYIALNAIHRRLAKVSNGDTVSVSRFVPPENFNLALLRVELEFVXKGTKNEQVDAVHLANQLKRXFVNQVMTAGQKXTFEYHGNNYIFTINQAQ

SEQ ID NO: 112223 - protein, 60 aa, Gossypium hirsutum
  Clone ID: uC-gsflmaxxa002e01b1.pep
IELMCLKATRLQLLGSHQLLLVMHLTKRTAKMPTILRRRRLDQDSMLSLNSLERNRRILL

SEQ ID NO: 112224 - protein, 169 aa, Gossypium hirsutum
  Clone ID: uC-gsflmaxxa002e07b1.pep
SCLNGSWLVVFGGCGRQGLLNDVFVLDLDAKQPTWKEVSGGAPPLPRSWHSSCTIDGSKLVVSGGCTDAGVLLSDTYLLDLTTDKPTWKEIPTSWAPPSRLGHSLSVYGRTKILMFGGLAKSGNLRLRSGEAYTIDLEDEEPQWRQLDCSAFTSLVAKMLWYLLLDWIM

SEQ ID NO: 112225 - protein, 118 aa, Gossypium hirsutum
  unsure (1)..(118): unsure at all Xaa locations
  Clone ID: uC-gsflmaxxa002e11b1.pep
IFSQVVIRFEFLIAWVHFSKLPLEYYAVMAVWRIVSCVGRVICIDWNTEDVHTGGFARVCIDLDLTKLSCSSVSLGKVCQRVKYDGLQLICFXCGKFGHRKDSCPMSTIAASGTDKVL

SEQ ID NO: 112226 - protein, 171 aa, Gossypium hirsutum
  Clone ID: uC-gsflmaxxa002f06b1.pep
IKDYPFANDGLVLWDILKEWVSDYVNHYYPEASLVESDEELQAWWTEIRTVGHGDKKDEPWWPVLKTPQDLIQIVTTIAWVTSGHHASVNFGQYTYAGYFPSRPTIARKNMPTEEATERDWEFFMNKPEVLLLLCFPSQIQATTVMAILDVLSNHSPDEEYLGEKSELAWA

SEQ ID NO: 112227 - protein, 77 aa, Gossypium hirsutum
  Clone ID: uC-gsflmaxxa002f08b1.pep
MSTAGQVIGCKPAVAWEAAKPLSIEEVEVAPPQKHEVRVKNLFTAPWHTDVYYWECKGYTTMFARILGHEASGIVES

SEQ ID NO: 112228 - protein, 59 aa, Gossypium hirsutum
  unsure (1)..(59): unsure at all Xaa locations
  Clone ID: uC-gsflmaxxa002h04b1.pep
ETADARSWKRTNLFLEIPSRSLDDSSXDSVTVKMPQTPSLTPRKVNFHLTPNPSDGRIN

SEQ ID NO: 112229 - protein, 98 aa, Gossypium hirsutum
  Clone ID: uC-gsflmaxxa002h07b1.pep
AVDHCFPQKKEERKLYRFPSKTKRKKKSKLKASRSRSNTQIHNKTGNTSSIRRNLHLTKRKLSIDHHLHKKQLPQRINYRCSHSLHRLDNNSSKFISP

SEQ ID NO: 112230 - protein, 148 aa, Gossypium hirsutum
  Clone ID: uC-gsflmaxxa003d04b1.pep
GFWGFLRLKCVCFRHFLLRIFIMWALRRVPKPLRDTSIRTGASFSASARLQTSNTFIEKNAIFSGSSQLVSDTCPSLLRFYCSTHASSNFFVWRCGLSSQAGAESSGEEDDLEDGFSELETAGNSENKEIIFLRMKLKMDWILIKNFC

SEQ ID NO: 112231 - protein, 123 aa, Gossypium hirsutum
  Clone ID: uC-gsflmaxxa003d06b1.pep
VLIILKSTAMAAMASSTFFFFLLCLTVTAKKTYIVHMKHQDKPLSFETHNDWYRSSLQSLTVTPAESLLYSYNAAFNGFAASLDPEQAEALGKSDSGLGCYEDTGYNLHTTRTPPVLCLDAES

SEQ ID NO: 112232 - protein, 81 aa, Gossypium hirsutum
  unsure (1)..(81): unsure at all Xaa locations
  Clone ID: uC-gsflmaxxa003e11b1.pep
MKNLQSTEDIKPFTEDLHEPKTEQQYIKTANGFLADTGSLSAFSNNGGKVLCQDIELVQXFIERCLQLYLNRDEVCKTLLN

SEQ ID NO: 112233 - protein, 108 aa, Gossypium hirsutum
  Clone ID: uC-gsflmaxxa003f01b1.pep
FASELLLMLCQHEVDRLEVWAQPLSKEGTSSRPKISPDKWIEYARTAFSVDPRIAFSLASRFPTNTHLKAEIAQLVQSHILDIRCIPEALPYFVTPKAVDENSVLLQQ

SEQ ID NO: 112234 - protein, 110 aa, Gossypium hirsutum
  Clone ID: uC-gsflmaxxa003f03b1.pep
MMLQKVASNAYSWWWASHIRTKQSKWLEQNLHDVEEKVSNMLEIIDDDGDSFAQRANMYYRKRPELLAIVEDTYRAYRALAERFDYLSRDLQSANRTIATVFPDQVHIPF

SEQ ID NO: 112235 - protein, 128 aa, Gossypium hirsutum
  Clone ID: uC-gsflmaxxa003f10b1.pep
VGNLIVMDGWLKGSNSFVDRVGLNDSTVLALSGRDFDNRFKNENCVDIPSSEPVMIPGNSGNMVSSFGTCSDRVGLNDGTVLALSGRDFDSRFKNENYVDVLPLEHVMVPGNLVPSFGTCFDTVGLNV

SEQ ID NO: 112236 - protein, 61 aa, Gossypium hirsutum
  Clone ID: uC-gsflmaxxa003f12b1.pep
DLPSYPHQNAQNLNPMAIAQPIDAQLAIQRQGIDGLLQLRNERLRYVLQEQMKRPHTILVK

SEQ ID NO: 112237 - protein, 171 aa, Gossypium hirsutum
  Clone ID: uC-gsflmaxxa003g03b1.pep
MEDLVPLWNYQEDFDELKLKLQYTSIELESVKMEAYEQIRKYRDEVNHLVNLVKLACQERDEARDQFQKLVNKLMASSSSSSSSTILPQPQPENLLVIAAAKANSSITESNSLSETYNHHPSHGSSPVDSLFDAVTSPDFLSINNNMVDNSLIHNLGKGKLCLKKEAFAAV

SEQ ID NO: 112238 - protein, 129 aa, Gossypium hirsutum
  Clone ID: uC-gsflmaxxa003g04b1.pep
RGLRLDFNRLFGGAACIEIQNLTRDLIKRVIDGAAEIFWEIFVQVELQRQSPPPQDGSIPKLVSSITDYCNKLLGDDYRPILTQVLVIHQSWKHKKFQEMILVNEVSKIIKAVDLNLDTWMKAYGDTTL

SEQ ID NO: 112239 - protein, 59 aa, Gossypium hirsutum
  Clone ID: uC-gsflmaxxa003g05b1.pep
EPEEASRVTLLGPPSFTPRSGGDIRFQKAKRTRTASIVEHSGWIGGSETENLMIRINVC

SEQ ID NO: 112240 - protein, 80 aa, Gossypium hirsutum
  unsure (1)..(80): unsure at all Xaa locations
  Clone ID: uC-gsflmaxxa003g12b1.pep
RPRVRPRVRAGGVLVWLVRRKWKTGEDKMGKEKKREEVEEEGQNGXFMVVDEGFALELEDLLRASAYVVGKSRSGILYKV

SEQ ID NO: 112241 - protein, 51 aa, Gossypium hirsutum
  unsure (1)..(51): unsure at all Xaa locations
  Clone ID: uC-gsflmaxxa004a06b1.pep
IPQLSNLEVWFQCSKDIVRILLSGDLDLGIVGLDPVSEXFGLGNEDLIIVL

SEQ ID NO: 112242 - protein, 45 aa, Gossypium hirsutum
  Clone ID: uC-gsflmaxxa004a07b1.pep
FYESALARKRIVTAEERERAINAAKAFEPTNPFCRVVSRPFYLYR

SEQ ID NO: 112243 - protein, 37 aa, Gossypium hirsutum
  Clone ID: uC-gsflmaxxa004a08b1.pep
RIICQYEMPKRIILDNALNLSNRTTIEVCSLFLINIM

SEQ ID NO: 112244 - protein, 49 aa, Gossypium hirsutum
  Clone ID: uC-gsflmaxxa004b06b1.pep
LSQELAERSKQWRLRLPLVWLSKPVRCSWGEKIVPISLLCCLVQQVSAV

SEQ ID NO: 112245 - protein, 106 aa, Gossypium hirsutum
  Clone ID: uC-gsflmaxxa004b09b1.pep
EGLLVSLKACGRFSLRSSSTAAEQTAVLKPFPRREAANSSFPLLESLNLRELNSSWVLVDSTSLKQHLLSCKWEIRAALVFALPIVRYFFISFWPMLFLLLNGWFN

SEQ ID NO: 112246 - protein, 61 aa, Gossypium hirsutum
  Clone ID: uC-gsflmaxxa004b10b1.pep
LKNPLALSNNRWNFIDQEKEMKERKRQNLLRERKRKQKKEGKKIGREEYGGTEGESAERFR

SEQ ID NO: 112247 - protein, 45 aa, Gossypium hirsutum
  Clone ID: uC-gsflmaxxa004d10b1.pep
VVLEKIQDKWRTEDLGRLKFHDSVAANMWTAHEIVERCTGGLVLW

SEQ ID NO: 112248 - protein, 151 aa, Gossypium hirsutum
  unsure (1)..(151): unsure at all Xaa locations
  Clone ID: uC-gsflmaxxa004e08b1.pep
MENGGEDPVFSYSYYRRKERIALVAIVVLASVAVASLLVASSYYWYIRNRVLSKRSKSHSTGGDSKDKACSTDLEVAMDEGLHVFTFKQLHSVTGGFSKSNVVWHGGLGSVYRGVLSNGRRXAVKLMDQAGKQGEEVFKKEVELVKRIRSS

SEQ ID NO: 112249 - protein, 165 aa, Gossypium hirsutum
  Clone ID: uC-gsflmaxxa004f04b1.pep
YCCSAFEKLKAMEQSLEKGKQIQDNCGASIKRLRAMLHSTEDQLRVHKKKTTFLAQLTAKTLPKGLHCLPLRLTTEYYTLNSSQQNFLDEDKLEDPRLYHYALFSDNILAAAVVVNSTISHVKHPSKHVFHIVTDRLSYAAMRMWLLCNSPGKVTIQVQNIEEFT

SEQ ID NO: 112250 - protein, 91 aa, Gossypium hirsutum
  Clone ID: uC-gsflmaxxa004f11b1.pep
PLRSKPFTLSIWDNSGLKSVGPKRHDYRWFATPIVLGRSPFHTGETSLKTAFVLSSRGHKPDRKEFTTVHYKSSILHRGDGIFMSLGGDYL

SEQ ID NO: 112251 - protein, 59 aa, Gossypium hirsutum
  Clone ID: uC-gsflmaxxa004g01b1.pep
LKEEKIWLFPAFSSTASALVLIIWTLELFYGFEIDRSFQLLTWILKEFLFSKKIFYSGS

SEQ ID NO: 112252 - protein, 157 aa, Gossypium hirsutum
  Clone ID: uC-gsflmaxxa004g02b1.pep
MSNLENPRNWRFTWEAQSHSPNLRLFLFDSQAKPSVQCRNLEVQLNLSQSHLLVSWLKEGEKEEVSVRVSTPRVLIDSEAPVSFRALDDHIEVKLALLLPVDHPSVSSFDLMLDSSGNGYNDPSLDAAQPLLMDTDLQSLSSMEGVHLYCRKCSTRL

SEQ ID NO: 112253 - protein, 99 aa, Gossypium hirsutum
  Clone ID: uC-gsflmaxxa004g06b1.pep
MDFNELEAIEGLRWPWHSWPTTKPDASSLTIPLAVMCTPLTEFSELPILPYDPLICSKCGAVLNPYARVDYTCRVWYCSFCFSKNSFPRTYSSSFEESN

SEQ ID NO: 112254 - protein, 67 aa, Gossypium hirsutum
  Clone ID: uC-gsflmaxxa004g07b1.pep
MADETYSGLGNGGEIDTKVVQTFQKNFVQVQNILDQNRLLINEINQNHETKIPDNLTRNVGLIRELN

SEQ ID NO: 112255 - protein, 103 aa, Gossypium hirsutum
  Clone ID: uC-gsflmaxxa004h12b1.pep
LPCLSAMPWVFKKGTKEQCQMFCCALWIIWSLQNQMLHERKLASGRDLVQKIQSYLTELEGVGKKKRTLGIARTQGQREETTRDIVQFDAAFDIRDWRGEIKA

SEQ ID NO: 112256 - protein, 141 aa, Gossypium hirsutum
  Clone ID: uC-gsflmaxxa005b08b1.pep
MFQFNMDSKFKGIVWVGNIYQRFEALCLEMDDMVCQETFQYVEDQLQTVGANARQFCTELMQEVLPSSPTNSKEELNLSLLQNAAVTANKDSNINVHKDCIQKELSHVRYIKNIHVGSSSGHSTENERGLAQACKNEAHDT

SEQ ID NO: 112257 - protein, 82 aa, Gossypium hirsutum
  Clone ID: uC-gsflmaxxa005c01b1.pep
LTFSRTQGGRYELASTQDLSIPCHLWTLHAGYGGSGALSECFDLMLLPEENQSGSGFAHFKGGCSNMLLIYYLTKVKAWSFF

SEQ ID NO: 112258 - protein, 89 aa, Gossypium hirsutum
  Clone ID: uC-gsflmaxxa005c05b1.pep
PPPVESKLPCTLEELYTGSTRKMKISRTIVNASGRQAQESEILTIDVKPGWKKGTKITFPDKGNEQPNQLPADLVFVIHEKPHDFYKRD

SEQ ID NO: 112259 - protein, 44 aa, Gossypium hirsutum
  Clone ID: uC-gsflmaxxa005c10b1.pep
NYRITVLATRTLWRSFVRCSLPLFEPFPGWAGRYPEKITLPEAT

SEQ ID NO: 112260 - protein, 92 aa, Gossypium hirsutum
  unsure (1)..(92): unsure at all Xaa locations
  Clone ID: uC-gsflmaxxa005c11b1.pep
CGLDRVKKMFVDIQSKLAGAPQFLLCLLPDRKNSDLYGPWEKKNXLSGVRIYPHSLAPIRVNRSSPYQPCFLKFNAKLGRTCIPLITNCAKH

SEQ ID NO: 112261 - protein, 66 aa, Gossypium hirsutum
  unsure (1)..(66): unsure at all Xaa locations
  Clone ID: uC-gsflmaxxa005d02b1.pep
MKNVTRCFVCLXGHWPSAWRDGVNTDIIATXLTNPTARPCALIFFGKGVCASCLFQEHSALTTPRS

SEQ ID NO: 112262 - protein, 108 aa, Gossypium hirsutum
  Clone ID: uC-gsflmaxxa005d04b1.pep
HSSELVTFSSYPLLNPPEVSNAGRHLSAAEFHSVLQSARQLMKNGSPTDDKQLVLLDARNLYETRIGKFHAPSVETLDPGIRQYSDLPSWIDDNSELLRGKHVLMLVF

SEQ ID NO: 112263 - protein, 67 aa, Gossypium hirsutum
  Clone ID: uC-gsflmaxxa005d10b1.pep
MKAACPTDDRELALLDARNLSETRTGKVHAPSVETLDPGLRPHSDLPSRIDDNSQLLRGTHVLMLVF

SEQ ID NO: 112264 - protein, 41 aa, Gossypium hirsutum
  Clone ID: uC-gsflmaxxa005e03b1.pep
LVEKSEAELMKRTNLHMTGHYAPTSNNSEPHYYAANLLTIE

SEQ ID NO: 112265 - protein, 82 aa, Gossypium hirsutum
  Clone ID: uC-gsflmaxxa005e09b1.pep
PLVRRSPTLCRHLLRCNAATGLLHTSDSTFLEISSHRVRWPARRTMTGPAPGVLTGARPDSKGKRELRVNFLFFFFFRTRER

SEQ ID NO: 112266 - protein, 62 aa, Gossypium hirsutum
  Clone ID: uC-gsflmaxxa005e10b1.pep
WRLNSLKGSPFYNTVMGETSVVTALHNLVAQPPFSSCCNRKKEGSTQLFYQEMSPLGEWGDP

SEQ ID NO: 112267 - protein, 36 aa, Gossypium hirsutum
  Clone ID: uC-gsflmaxxa005e12b1.pep
LWRSLIEFPFDSSFLWGLNFHHGSRISKADANCWLW

SEQ ID NO: 112268 - protein, 124 aa, Gossypium hirsutum
  Clone ID: uC-gsflmaxxa006a01b1.pep
MWRNSATVSFSSKLLSYSSSSANPNYFHYASAFSIFSPNGVVDQTLSSSHQRFYCSSAVPSPSPSSGSVIKLGFLASKSDAFRPLCLKARDAVQLARHYGRCYWELCKARLSMLVVATSATGYV

SEQ ID NO: 112269 - protein, 151 aa, Gossypium hirsutum
  unsure (1)..(151): unsure at all Xaa locations
  Clone ID: uC-gsflmaxxa006b03b1.pep
GRVVHWWTHGXIIDFTYRNLQRAXTWRSGAHASSDRTTDLEVAEAVQGNIKXYRIFTQAGTDTASVRRSXRGDYPWMSRAYDPCTERNWNEYCNGTEDEMALHARCTGMXYQWETCSDXIGYNWTDCALGMLPIYQELIADGIRIWVYSGH

SEQ ID NO: 112270 - protein, 92 aa, Gossypium hirsutum
  Clone ID: uC-gsflmaxxa006b12b1.pep
RALAPSQTPAIIEIEGFLLFNIFLLLELMGGYYLLKSLLESASSICALGGLGPCSLYVDHVDSLRTYRGSWRQQKLNLKNTMHRRPLGPNTK

SEQ ID NO: 112271 - protein, 66 aa, Gossypium hirsutum
  Clone ID: uC-gsflmaxxa006d01b1.pep
IMRGICRKEDIRYHVLLNKRMCIESHEQLMEPVIHACQGISYRKLDVNLTTSIEKLVKAGETSRVT

SEQ ID NO: 112272 - protein, 54 aa, Gossypium hirsutum
  Clone ID: uC-gsflmaxxa006d06b1.pep
KISKANERREIQRLPTLKTPSTLERYKRKTRFYNGVVYHSVLGFFEFKMSTPAW

SEQ ID NO: 112273 - protein, 36 aa, Gossypium hirsutum
  Clone ID: uC-gsflmaxxa006e02b1.pep
TKEPNSFFTCIMENSELQLKSLISKTPQKRKDDNRV

SEQ ID NO: 112274 - protein, 39 aa, Gossypium hirsutum
  Clone ID: uC-gsflmaxxa006e08b1.pep
QHAIIMHKPFPMQRWPSFLSLFENKNKAPHGRWCRTRER

SEQ ID NO: 112275 - protein, 64 aa, Gossypium hirsutum
  Clone ID: uC-gsflmaxxa008a08b1.pep
YASAFSKFCPASFSPSSAVILSTQFLPLNSLAIFQIFSFIFSHRSATFSSSAPIFQFTDDYDLC

SEQ ID NO: 112276 - protein, 62 aa, Gossypium hirsutum
  Clone ID: uC-gsflmaxxa008d07b1.pep
IKLLIPALAKSWISLLYVYIYKRNKSASFCRCLMQKQSITTFKALFFASDLSIFVFRFAFLK

SEQ ID NO: 112277 - protein, 95 aa, Gossypium hirsutum
  Clone ID: uC-gsflmaxxa008d11b1.pep
ANPPPLAPKTSAEAIGQKPGYQPIRKHCKHTRGSPAPATKRKGKGKEERNTATTTTSEKESPTQPQQTPQPNEAEARQKKEHTLHDAREYEWKHK

SEQ ID NO: 112278 - protein, 54 aa, Gossypium hirsutum
  Clone ID: uC-gsflmaxxa008e12b1.pep
MKMYDMERNIVWSIVTNPLKIEELISIRWVSYDLIKPFQCSSQQENQGSRGEIP

SEQ ID NO: 112279 - protein, 163 aa, Gossypium hirsutum
  unsure (1)..(163): unsure at all Xaa locations
  Clone ID: uC-gsflmaxxa008f08b1.pep
CRHQLWSEIGECLHNRKILVVPIFEKHYVTKNELSLTTPYASVPQPSESEAENKGRKILLDINLPCDVTLPDMNQDIVAENSAIEKEANTKLPSSPHQFDLNSCVDEDEASFVPSVPSSGMKMTXGIDLEVPLIPEPEDVIHGEELLEKGIEPPLQSVQSKDD

SEQ ID NO: 112280 - protein, 48 aa, Gossypium hirsutum
  unsure (1)..(48): unsure at all Xaa locations
  Clone ID: uC-gsflmaxxa008f10b1.pep
RPTXPVRPHQAKKALKYVFHAAANNFPGKEXELLIATLPDNNGSLYGD

SEQ ID NO: 112281 - protein, 45 aa, Gossypium hirsutum
  Clone ID: uC-gsflmaxxa008g11b1.pep
KCRLIFYGGRAFCAFCAFLCSRGKTCDIMLYKKITLSLLGIGTYF

SEQ ID NO: 112282 - protein, 66 aa, Gossypium hirsutum
  Clone ID: uC-gsflmaxxa008h02b1.pep
RPLIHHPPHHKTPTGVFFKKESGELSTFKRLNWIGYPVTINLCIQTPRKQRPQDTQGQTRKDRAPP

SEQ ID NO: 112283 - protein, 44 aa, Gossypium hirsutum
  Clone ID: uC-gsflmaxxa008h11b1.pep
ILNHISAYIIGVFVIAFPRKHNERRRGGGETPGTTTETGAGGGG

SEQ ID NO: 112284 - protein, 75 aa, Gossypium hirsutum
  Clone ID: uC-gsflmaxxa009a02b1.pep
LASGYIELVKKHDLEISQPGLEPNVGLTWQMTKRREDQEVHKFTKEKPGWCSDPHFPPCAAYCLSPCLSLMNFTI

SEQ ID NO: 112285 - protein, 101 aa, Gossypium hirsutum
  Clone ID: uC-gsflmaxxa009a12b1.pep
RDSRGIAYLYRSRDFIHWTKAKHPFHSAPNTGMWECPDFYPVSLSSKEGLDPSYMGKHVKHVLKVSLDDARYDYYTLGTYLTNEDQYVPDNALHDGWAGPR

SEQ ID NO: 112286 - protein, 77 aa, Gossypium hirsutum
  Clone ID: uC-gsflmaxxa009b08b1.pep
WLSQPSAPPYVVFSGSFSTFLSARRLDVVMMTDRSDSRRRLKRENAGKLQDLANSLRIIFSLDLSLSREPTRPRTRG

SEQ ID NO: 112287 - protein, 45 aa, Gossypium hirsutum
  Clone ID: uC-gsflmaxxa009c03b1.pep
MYGSDRAGDDAERTAFRKTEKKYKLYYENSKSTKKKKQPKQVDLS

SEQ ID NO: 112288 - protein, 77 aa, Gossypium hirsutum
  Clone ID: uC-gsflmaxxa009e08b1.pep
GRISFYMTSFGEEAATISSAAALTKDDIILPQYREPGALLWRGFTLQEFVNQCFGNKDDGGKGRQMPVHYGSSKHNL

SEQ ID NO: 112289 - protein, 121 aa, Gossypium hirsutum
  Clone ID: uC-gsflmaxxa009f06b1.pep
RFQTHEAMRYSLLAGGKRVRPALCLASCDLVGGTECMAMPAACALEMIHTMSLVHDDLPCMDNDDLRRGKPTDHKVHGEDIAGLARDALLACYLVHISVCTAGVTPEKLVRALRELGKCIE

SEQ ID NO: 112290 - protein, 74 aa, Gossypium hirsutum
  Clone ID: uC-gsflmaxxa009g10b1.pep
AFSGGLSVSSFCSRNSLAFAQISRVCGGFQFPLFCFCFSRVLTPGQLYLIITLACLNLNLRESIIGEEEEITSL

SEQ ID NO: 112291 - protein, 68 aa, Gossypium hirsutum
  Clone ID: uC-gsflmaxxa009h12b1.pep
MVIILMLFNLNVYYVIFNVNGSMYNRINVMMNWRMLSPGRTLGIRRIQMTCHQGFHVSGVGLKYPTDG

SEQ ID NO: 112292 - protein, 141 aa, Gossypium hirsutum
  Clone ID: uC-gsflmaxxa010a05b1.pep
MGDEKVKEEAMRMIGMFQVLPRLVVFDLDYTLWPFYCECRSKREMPSMYPHVKGIIAALKDKGIDLAIASRSPTADIANTFLDKLNIKSMFVAKEIFSSWTHKTDHFQRIHSRTGIPFNSMLFFDDEDRNIQAVSKMGVTS

SEQ ID NO: 112293 - protein, 75 aa, Gossypium hirsutum
  Clone ID: uC-gsflmaxxa010a06b1.pep
ADQGVDVIALASDQVDVPVYVDYIDIDPGGNSQHDLSLALHTDTSRQPQYYEANLNGVETFKISDPKSITCRAEY

SEQ ID NO: 112294 - protein, 91 aa, Gossypium hirsutum
  Clone ID: uC-gsflmaxxa010b02b1.pep
RPKCPKLQTKIKLKLEWPNYSSPIPRPNYIEAQNRKRTRNLSSKGEPPPPQPPGHSLGLTRASIHATSTLHASYLVADLPSAPSQLESDGG

SEQ ID NO: 112295 - protein, 174 aa, Gossypium hirsutum
  Clone ID: uC-gsflmaxxa010b04b1.pep
ASKQMDQVFSHRSTDFPNSHFLRVEAEEQPEISEEYSVSAVPFFVFFKDGKVVDKLEGADPSSLANKVAKVTGSINPGEAAAPASLGMAAGPTVLESVQDLAKANGSSQMGNQVQTGLDDKIKKRLQQLIDSHPVMLFMKGNPEEPKCGFSRKVVDILKDEKVKFGTFDIISDN

SEQ ID NO: 112296 - protein, 137 aa, Gossypium hirsutum
  unsure (1)..(137): unsure at all Xaa locations
  Clone ID: uC-gsflmaxxa010b08b1.pep
MNTVFSVDDFSDSFWAAPASDDALGMTRSHSEWALERFLEEFSGAGVAISGSHAGENVIGPSLMSXLSRPFSKVEEGNVVEIKRPNSQNHNHPPSDQTPTVPTDSDDYHTILKSKLELECAXALAVKAEDSSAEAEN

SEQ ID NO: 112297 - protein, 85 aa, Gossypium hirsutum
  unsure (1)..(85): unsure at all Xaa locations
  Clone ID: uC-gsflmaxxa010c01b1.pep
KKIKKLKIIRNKRKKKKKKKKEKKEMKDKKXNKKEIIKKKKKNKRNKRKKKKXKEKIKRIRKKREKKKKKKKKKEKTKPSGNHQA

SEQ ID NO: 112298 - protein, 53 aa, Gossypium hirsutum
  Clone ID: uC-gsflmaxxa010c07b1.pep
KKPKVEKENSKDGFTKEKLAVKKQTNKSSAKVSAKLLGICLTCLKSYTCAYFL

SEQ ID NO: 112299 - protein, 27 aa, Gossypium hirsutum
  Clone ID: uC-gsflmaxxa010c09b1.pep
VVKCGHFELDLEFSGFKTPDSVHPRKE

SEQ ID NO: 112300 - protein, 71 aa, Gossypium hirsutum
  Clone ID: uC-gsflmaxxa010d01b1.pep
PHPLFLQIQPPPLWSPLVHCPLQGLSALHSLPLSLTFYVSNKTSLQDNELEKLKNGRETLIRDFVTENPNL

SEQ ID NO: 112301 - protein, 84 aa, Gossypium hirsutum
  unsure (1)..(84): unsure at all Xaa locations
  Clone ID: uC-gsflmaxxa010d09b1.pep
TETIKAGSGRLCGIPITIEVMNFQFIGGSMGSVVGDKITRLIEXYATNNFLPLILVCASGGARMQEGSLSLMPMAKISSALYDY

SEQ ID NO: 112302 - protein, 48 aa, Gossypium hirsutum
  Clone ID: uC-gsflmaxxa010e02b1.pep
IYLSSTSVLLTCCLFFILLILKLFPFEEKLEFFYLTNNGVLTVFLMIY

SEQ ID NO: 112303 - protein, 42 aa, Gossypium hirsutum
  Clone ID: uC-gsflmaxxa010e10b1.pep
AASDSDDLMNFISKAQIIKVLGKVVARDDSSIADSRLNQKRS

SEQ ID NO: 112304 - protein, 55 aa, Gossypium hirsutum
  Clone ID: uC-gsflmaxxa011a01b1.pep
SYEVSILTRTFYPTLLSMKNHLFNVFLSLLLGEQSINCGLPRNFSSPKLHHIYGR

SEQ ID NO: 112305 - protein, 171 aa, Gossypium hirsutum
  unsure (1)..(171): unsure at all Xaa locations
  Clone ID: uC-gsflmaxxa011a02b1.pep
FTTVITRKSSGKEKKPPEIGGARPFLGHLHLLGGPKPAHITLGNFADAYGPIFTFRLGMHPTLVVSNWEMAKECFTTNDKAFASRPRTLAAELLGYNFAMFGFSSYGPYWRHVRKIATLEVLSNYRLAKLRHVRESEIRASIKRLYELVTKNCSEPVVVEMNRWXWTLNIN

SEQ ID NO: 112306 - protein, 58 aa, Gossypium hirsutum
  Clone ID: uC-gsflmaxxa011a05b1.pep
VRPRSSGIRSYELSRASGCASGSTLRPVLSRSLSLTWGLAVSRVDSPFTRKDSSSQEP

SEQ ID NO: 112307 - protein, 79 aa, Gossypium hirsutum
  Clone ID: uC-gsflmaxxa011a08b1.pep
NLQFYLFIFIFTFLALLSQGFPFSSFGQKLRFILFYFEAFIPADYSSKVFFPLFPLVDLLEASSFQFGKSSLRVCWISG

SEQ ID NO: 112308 - protein, 37 aa, Gossypium hirsutum
  Clone ID: uC-gsflmaxxa011d12b1.pep
SSSLIIPIKLSHSLPIRRLNKETTQVDPSIPKTLLVE

SEQ ID NO: 112309 - protein, 43 aa, Gossypium hirsutum
  Clone ID: uC-gsflmaxxa011e03b1.pep
DNLIFFSHSLNLTFNVSLRYTPRLFFPTPQPLPRPFSRLRPPS

SEQ ID NO: 112310 - protein, 76 aa, Gossypium hirsutum
  Clone ID: uC-gsflmaxxa012a01b1.pep
SKLVPIVNKLYADSSNKFINFCPFLSRPSVLYCLSRSCLFFSLPFSFYLSRSHQGRQAATALVAVRVGERVGARVG

SEQ ID NO: 112311 - protein, 171 aa, Gossypium hirsutum
  unsure (1)..(171): unsure at all Xaa locations
  Clone ID: uC-gsflmaxxa012a04b1.pep
YASVKNPLNGIRFTHKLLETTAISENQKQLLETSDACERQITVIIEDIDFRSDDEGMELSMEEFVLGNDLDAVVSQVMILLKERNLQLFHETPKEIKALSLYGDRIRLQLVLSDFLLNMVHHAPSPDGWVEIKISPGLKLLRDGNEFLXIQFRMTHPGKGLLSLLFKKCLR

SEQ ID NO: 112312 - protein, 32 aa, Gossypium hirsutum
  Clone ID: uC-gsflmaxxa012a06b1.pep
DKVHNWRDYLRLHCYPLHKYVPEWPSNPPSFK

SEQ ID NO: 112313 - protein, 50 aa, Gossypium hirsutum
  Clone ID: uC-gsflmaxxa012a11b1.pep
KKATQDTIGIFDLRSGDVIPSGSVYFDLGVMDVLRIAYLIFCTSTAFILF

SEQ ID NO: 112314 - protein, 61 aa, Gossypium hirsutum
  Clone ID: uC-gsflmaxxa012b03b1.pep
LLPTKFHIEHQYLLIKPHKSLQCLAERCCIIRVEMIRISHCRARKDEDQRILETLSEFGDQ

SEQ ID NO: 112315 - protein, 48 aa, Gossypium hirsutum
  Clone ID: uC-gsflmaxxa012b09b1.pep
CNNKEFSLTSNLICRNKIVTKSHLQPNFQNKNIWHTKGFRDRKCFHCL

SEQ ID NO: 112316 - protein, 60 aa, Gossypium hirsutum
  Clone ID: uC-gsflmaxxa012b11b1.pep
VSDDNTDGFDSHRAADIVELDDDGDGTGEQILEISSLGRAVEVYYMSIKFDIIWTLNYCA

SEQ ID NO: 112317 - protein, 69 aa, Gossypium hirsutum
  Clone ID: uC-gsflmaxxa012c07b1.pep
NREILLAKQTQERTQVEEKQELHSNTLRFLKFFKAKSENSNDEKCWVSFKFQHFKENPLLRRPPPVRFR

SEQ ID NO: 112318 - protein, 52 aa, Gossypium hirsutum
  Clone ID: uC-gsflmaxxa012d11b1.pep
HKLINNSAILFFLLHRSCEVSPNIPSLSLSLSLCAYLAALTHRELSYLYNTQ

SEQ ID NO: 112319 - protein, 70 aa, Gossypium hirsutum
  Clone ID: uC-gsflmaxxa012e09b1.pep
LALIANGVEAGTIKCACTKQQEFWISIAYCSFLLFFQFQCHLFLLSLPLLPLIPLHCPLNAILSLSNLPS

SEQ ID NO: 112320 - protein, 95 aa, Gossypium hirsutum
  Clone ID: uC-gsflmaxxa014a04b1.pep
LFPSICSLFLQTFPSTFPRKFYPSPEPMPVTGETDDGNNNNSISHILSYKTPLFNLKLYLVISIFLAFFLLLFSFTIFLCCPLNRNARKRKVKHS

SEQ ID NO: 112321 - protein, 96 aa, Gossypium hirsutum
  Clone ID: uC-gsflmaxxa014a11b1.pep
SVLLLCCFLLLPFYVFATPVLKLLRQPDDVAEMSGVAAIWMIPLHFSFAFQFPLQRFLQSQSKTAVLAYVSFGALGVNVLTRWVFVNGLDWGVIGA

SEQ ID NO: 112322 - protein, 122 aa, Gossypium hirsutum
  Clone ID: uC-gsflmaxxa014b02b1.pep
CFFLLFRFLCFFSYIFISKNKMNDQSQMINQPPQMMMDPIQSQMMNQSHQLMAAAAAAAHSQARSQLGAVLSQPMSSGHQMMNQPPPTLLNRSYMPWQSQDPNPNPSKKFPSFTRNNNWKGK

SEQ ID NO: 112323 - protein, 72 aa, Gossypium hirsutum
  Clone ID: uC-gsflmaxxa014c01b1.pep
AIDLQNERILALLCSRILIGRGKEAYQDSPSNGELNRKKPSLRIGSHRCSNWSLEKTSQRQIGPKILGKGRP

SEQ ID NO: 112324 - protein, 62 aa, Gossypium hirsutum
  Clone ID: uC-gsflmaxxa014c06b1.pep
PFPKFYNVFAILDHSLLFPQTTSIRISRSIFPLDLLLYGPSFPPPGMILPFSLKPLLLSYGL

SEQ ID NO: 112325 - protein, 36 aa, Gossypium hirsutum
  Clone ID: uC-gsflmaxxa014d04b1.pep
CLLLDVVNFSKAKYKSNCSITSEYININLYRSEMSL

SEQ ID NO: 112326 - protein, 47 aa, Gossypium hirsutum
  Clone ID: uC-gsflmaxxa014d05b1.pep
TYANAPAGDRFSSVSPLSETQAVVIVLTRIQLRFQLSRRPTVEADIV

SEQ ID NO: 112327 - protein, 58 aa, Gossypium hirsutum
  Clone ID: uC-gsflmaxxa014d06b1.pep
GAQFFPFGLCFRHSNEAFAWSYKEKPRSLRRKIWKKVVSFFKVKRKRRFGPTRPPTSQ

SEQ ID NO: 112328 - protein, 62 aa, Gossypium hirsutum
  Clone ID: uC-gsflmaxxa014d08b1.pep
IRAYCDPPFDPEIEGERVCVKLVNHPVTKLKYFFVEDEYLILNEPHAILVANLWNYVCFPRQ

SEQ ID NO: 112329 - protein, 61 aa, Gossypium hirsutum
  Clone ID: uC-gsflmaxxa014e08b1.pep
KKKPKTRYYIQKKPKFYLHAFKFDFMAVTSTSNRKEMDRIKGSWSPEDDDLLQKLVHKFGP

SEQ ID NO: 112330 - protein, 71 aa, Gossypium hirsutum
  Clone ID: uC-gsflmaxxa015a06b1.pep
VMCGCAGAGVAAGRYGAYGAGILRRWWHAWEADAHAGTARVSVIKFSGHLGLCNFEDGLALGYYFEYAACN

SEQ ID NO: 112331 - protein, 80 aa, Gossypium hirsutum
  Clone ID: uC-gsflmaxxa015a12b1.pep
YPRSAPPAPQPSHPIINNSLHKVSVSFHNYQKSVWCFLQSIVFIAVQTRSGRDHLPTVTAILVPKVKLMGHKYKREKCNR

SEQ ID NO: 112332 - protein, 69 aa, Gossypium hirsutum
  Clone ID: uC-gsflmaxxa015b04b1.pep
LRVPIPVRELEDMPFGRVMGDMVRLSTGDDGIINAALSSAEGFEVAIDLGLDTKLYCSDHTMGLLAMIS

SEQ ID NO: 112333 - protein, 85 aa, Gossypium hirsutum
  Clone ID: uC-gsflmaxxa015b05b1.pep
TRKTQKPNVKKKLFVLNLPWASTGDDIKDLFGQYGNVKEAAIIKQKDGKSRNSAFVTMASGDEAQAAVDNLDSTKFRENYKVELA

SEQ ID NO: 112334 - protein, 71 aa, Gossypium hirsutum
  Clone ID: uC-gsflmaxxa015c03b1.pep
MVVSFLSKLSILTFTASVLVASALAHDFSIVGYSPEDLSSRDKLIELFESWVSKHAKFYESFEEKLLRSEA

SEQ ID NO: 112335 - protein, 52 aa, Gossypium hirsutum
  Clone ID: uC-gsflmaxxa015e11b1.pep
CFRLSMSRSTFSVSIIPSSLFIGKKIGKEKLKSIMHYFVGCNLWDVFIVAIE

SEQ ID NO: 112336 - protein, 61 aa, Gossypium hirsutum
  Clone ID: uC-gsflmaxxa026a01b1.pep
YFMFQVNKESYLNKEYLFLLFYFPEFIHRDDFIHNAITFYVADMRTSTPTFYLHSGMLIIN

SEQ ID NO: 112337 - protein, 28 aa, Gossypium hirsutum
  unsure (1)..(28): unsure at all Xaa locations
  Clone ID: uC-gsflmaxxa026a02b1.pep
EIDEALLNHXGLSRDEVTCDGLYSPGEL

SEQ ID NO: 112338 - protein, 105 aa, Gossypium hirsutum
  Clone ID: uC-gsflmaxxa026a11b1.pep
MAFISRARRTFTGPFPPCSYLASIRLSSTLTSPKLFISGLPRETTDEQFQEAFYPFGQIVEAKVVRDRATRRSKGFGFVTYTSIEEAEKAREEMNAKFLHGWVIF

SEQ ID NO: 112339 - protein, 126 aa, Gossypium hirsutum
  Clone ID: uC-gsflmaxxa026b01b1.pep
LEAAAAVVEEYGLPCGKEEFLAELQPVFYAQLCNIKPLPGACRLLKHLSGHGVPMALASNSPRGSIESKISYHQGWKDYFSAIVGGDEVTAGKPSPEIFLEAAKRLNREPSSCLVIEDSMPGVTAG

SEQ ID NO: 112340 - protein, 94 aa, Gossypium hirsutum
  Clone ID: uC-gsflmaxxa026b05b1.pep
MSTKKKTSQGHLSRTRIGKYNLGRTLGEGSFAKVKFAENVETGQCVAIKILDRDQVLRHRMVEQIKNEILTMKLIKHPNVINIFEVLASKTKIY

SEQ ID NO: 112341 - protein, 88 aa, Gossypium hirsutum
  unsure (1)..(88): unsure at all Xaa locations
  Clone ID: uC-gsflmaxxa026b10b1.pep
MAVQRLDRGDLWKNKARVMELQLKQRFRVAVNRHRPLDLAERYFYCXVQRWVQRLRDFRRDFLPYSFSFYPKKVSKDFDVDVDSTIFL

SEQ ID NO: 112342 - protein, 167 aa, Gossypium hirsutum
  Clone ID: uC-gsflmaxxa026c02b1.pep
LKKVNEKQLDALKSIVHYSENRSIDATELLGSWQIKEKIVTLEEEIVELKKIIEEKKMKKRKRKEKGSSSTVKSQEMKRSRLATEGSPLPKSEANQLCEQLTTILSEGDGSVPISSNANNSPVTSAAPHGSTCCFPRNGIAQMGKANEKQLDALESIVQYPKNLVMM

SEQ ID NO: 112343 - protein, 91 aa, Gossypium hirsutum
  Clone ID: uC-gsflmaxxa026c03b1.pep
MSAPKRAWIVAASIYVVEALKDQGICRWNYCLRLAKNNFTKPFSSLKQEAPPAMAVATSGKMREEMMKPERSMKKVMELSSWGPKTIRFLM

SEQ ID NO: 112344 - protein, 64 aa, Gossypium hirsutum
  unsure (1)..(64): unsure at all Xaa locations
  Clone ID: uC-gsflmaxxa026c05b1.pep
HFAFDQELQVDPKVLHCXEEVGQYHGAYKISAGLLDTYGPERDLDSPIAEADSASIGDEPDYYG

SEQ ID NO: 112345 - protein, 49 aa, Gossypium hirsutum
  Clone ID: uC-gsflmaxxa026d03b1.pep
KRNIVSQNYSLKRINEVWNEPHFGYPFDNGFMNIQPPYLQWNPNHHLLG

SEQ ID NO: 112346 - protein, 88 aa, Gossypium hirsutum
  Clone ID: uC-gsflmaxxa026e03b1.pep
SSKQIVEDWKVGWRVKKNKVGEGEHLVSREEIAELVRRFLDFESMEQMEMRQRAWKIGETCQTAIAKGGSTDINLDAFIKDIFERHHH

SEQ ID NO: 112347 - protein, 58 aa, Gossypium hirsutum
  Clone ID: uC-gsflmaxxa026e04b1.pep
LDLTLMYNKVISTFFYYVHQQCDPITSVMCLVNMFTRCGFSGYKGNKSSFIQSPSFSR

SEQ ID NO: 112348 - protein, 87 aa, Gossypium hirsutum
  Clone ID: uC-gsflmaxxa026e05b1.pep
MEVLIMSPSSCSSLVSFSQETPSSTLQQRLQFVIQSQQDLWAYAIFWQTLNDDLGNLFLAWGDGHLQCTKDAFSRLSSSFHSERTKV

SEQ ID NO: 112349 - protein, 47 aa, Gossypium hirsutum
  Clone ID: uC-gsflmaxxa026g09b1.pep
GFSGLYKFRASLIPPNFPEWPSFYRGKRPSKFHSFFIKKNLFYEWFD

SEQ ID NO: 112350 - protein, 48 aa, Gossypium hirsutum
  Clone ID: uC-gsflmaxxa026g10b1.pep
LKWPAHPKAFSYPDRAQYDNSGTIVREPASTPRPNAAICFEPSIMTCL

SEQ ID NO: 112351 - protein, 159 aa, Gossypium hirsutum
  Clone ID: uC-gsflmaxxa026h06b1.pep
LTRGFAGYNKSVRVFDVHRPGRDFVQYSTLQGNKEGQTGIISAIAFCPTHTGMLATGSYSQTTAIYREDNMELLYVLHGQEGGITHVQFSKDGNYLYTGARKDPYIMCWDIRKAVEVVYKLYRSSESTNQRIAFDIECSGRHLGTGGQDGLVHIYDLQT

SEQ ID NO: 112352 - protein, 69 aa, Gossypium hirsutum
  unsure (1)..(69): unsure at all Xaa locations
  Clone ID: uC-gsflmaxxa026h09b1.pep
LRKPVHTKVDHLRHGTRGDTITVEGGSTKMGLQKGXADGPQVRQMRTAECLVXDETGMIMFTARNEQVD

SEQ ID NO: 112353 - protein, 58 aa, Gossypium hirsutum
  Clone ID: uC-gsflmaxxa027a10b1.pep
EGTKIVVLLLTRPIPWLPVTNQAINKKRVKHIRPKQIDLTMNHPMLYQSGIHATFYQH

SEQ ID NO: 112354 - protein, 41 aa, Gossypium hirsutum
  Clone ID: uC-gsflmaxxa027b12b1.pep
DLGMHQDSVYKKDAIYPNLRQKLGVVSKKPISQISVLHNKT

SEQ ID NO: 112355 - protein, 57 aa, Gossypium hirsutum
  Clone ID: uC-gsflmaxxa027c02b1.pep
FKNVTKSDKIYLHIFIISCVPILGVCDGNHAIINKEKPPLFVINSIHFGNGLHNTCA

SEQ ID NO: 112356 - protein, 92 aa, Gossypium hirsutum
  unsure (1)..(92): unsure at all Xaa locations
  Clone ID: uC-gsflmaxxa027d10b1.pep
SFSQSYEWSSSHVHHYKLHRGMTLAVIQDIXFSPFRQWIAIVPTRGTCHIYXLSPYGGENGTPNSEILMYIGHILINQLYLLPFGWTNSKFS

SEQ ID NO: 112357 - protein, 54 aa, Gossypium hirsutum
  Clone ID: uC-gsflmaxxa027d11b1.pep
YNISRTICWLVINGRVLIVTKFLDEHSVGEEVLLELAWKDATNEFNDIGHCMSV

SEQ ID NO: 112358 - protein, 112 aa, Gossypium hirsutum
  unsure (1)..(112): unsure at all Xaa locations
  Clone ID: uC-gsflmaxxa027e12b1.pep
SFVAPPPPIPSPSVIPVVPPFVSNPTTATTVAGGPPPSFDHPSYSDMICEAIGALXDKIGSSKRAIAXYIELVHKDLPPTHLALLTYHLKRXLKTNGILVMVKKSYKACFYC

SEQ ID NO: 112359 - protein, 71 aa, Gossypium hirsutum
  Clone ID: uC-gsflmaxxa027f11b1.pep
FTLGLMLTMHMLTLLLFGRSCLADQTKGYACLSLYPHQRLRNRSTWSMIMINMISGHHLMIHRCMMLKDMR

SEQ ID NO: 112360 - protein, 55 aa, Gossypium hirsutum
  Clone ID: uC-gsflmaxxa027g01b1.pep
EDQLTMAGWDALLDLLTRKLAKLLARCARLLLQKPVHRQPMSINQKPPKGKREAC

SEQ ID NO: 112361 - protein, 62 aa, Gossypium hirsutum
  Clone ID: uC-gsflmaxxa027g02b1.pep
FNWQINPLMIIIKPCKTYVKGNNGNKNKNVTHHMSTTSNKLTFLFLSVPIQNSKIYEFDWVG

SEQ ID NO: 112362 - protein, 56 aa, Gossypium hirsutum
  Clone ID: uC-gsflmaxxa027g04b1.pep
PIFQTKPKPLTQFLQAQRPNSLKQFRNPRVSESPLRCTPSMCALGGSSARRTAPLT

SEQ ID NO: 112363 - protein, 93 aa, Gossypium hirsutum
  Clone ID: uC-gsflmaxxa027g08b1.pep
RKEDKVFSLVVEAQAAVLEDQICESDDIFRSSAINGRETSERMKLDEGRKRLPPFPLVFLSRFGWKKMKANRFGLIWGYEIDGEFLERRRQAI

SEQ ID NO: 112364 - protein, 117 aa, Gossypium hirsutum
  Clone ID: uC-gsflmaxxa027h01b1.pep
LIVKDNLNEKLSYRDCEKIAKDLNLTLEQVLRVYYDKRQKRLNRFRGVPNSNGEQYQGERDKQSSSRKRKRSTVKSIEGIKADARIIQLGEKEGGTLSDGNDELKEDYHLTSSVGPD

SEQ ID NO: 112365 - protein, 110 aa, Gossypium hirsutum
  Clone ID: uC-gsflmaxxa027h06b1.pep
LLEASGSVVSKAEKVEVLSSDFDSVITLTSFSSEPHLFQKIIGVLLDFENQQLRTMHDVPFHVNMVEVPLNTTVAGPTHDGGRSLSGSNRSDFRPRVQCQICSHYGHSAQ

SEQ ID NO: 112366 - protein, 138 aa, Gossypium hirsutum
  Clone ID: uC-gsflmaxxa027h12b1.pep
MELGAQDYADRKKDISQFLSQDIYQDEIKAMINHKRRRLIVNISDLHSFNNLATRILKNPSEYMQPFFDAVTEAAKSIDPKYLKEGEIVHVGFEGPFVSRRVTPRELLSEFIGSMVCVVGIVTKCSLVRPKVVKSVHF

SEQ ID NO: 112367 - protein, 95 aa, Gossypium hirsutum
  unsure (1)..(95): unsure at all Xaa locations
  Clone ID: uC-gsflmaxxa028a04b1.pep
MDKPLLDAETRNGVSRRDRLYRPSEAITLGSHYQRAAALVELAEXGGGLPAHFIDISSSGSAANFYFMFIKCDIIWTLHDIALDDQNSLEKPMQW

SEQ ID NO: 112368 - protein, 161 aa, Gossypium hirsutum
  unsure (1)..(161): unsure at all Xaa locations
  Clone ID: uC-gsflmaxxa028a07b1.pep
SFLKESTDQAATCSGNIDAPFDETLFDIEKEIDDLLPVEVKEQRLSNXLLQATMVGGCVAAMPILKKIPTSVLWGYFAFMAIESLPGNXFWERILLLFTAPSRRYKVLKQKHATFVETVPFKTIAILTVFQTIYLLXCFGLTWVPIGXVMVPLMNMPFSPC

SEQ ID NO: 112369 - protein, 152 aa, Gossypium hirsutum
  unsure (1)..(152): unsure at all Xaa locations
  Clone ID: uC-gsflmaxxa028b05b1.pep
CFVGGRVGGRGGLNGYMWVYYGVVKPNSILVATVNGFGADLELVYVIIFLIFAPPRARAITAVLFGVLDEVFPIAAVLITQMSCNREMHITIAGFLYLVFSVLTYGSPLSIMKTVVRTKSEDYMPFLLSFIXFINGLTCTVYAVLLETGLLE

SEQ ID NO: 112370 - protein, 94 aa, Gossypium hirsutum
  unsure (1)..(94): unsure at all Xaa locations
  Clone ID: uC-gsflmaxxa028b10b1.pep
MEENKSKQNNVKRPKGGMIAMPFIISNEVCEKLAVAGXFYANMISYLTTQXLHMPVTKAANTLTYFGGTVSWTPXGMGHFVADAYAGRYWTLTV

SEQ ID NO: 112371 - protein, 61 aa, Gossypium hirsutum
  Clone ID: uC-gsflmaxxa028b11b1.pep
PQQAPDRNSRKDPRVCFKNREKSRQPSSSSYHKHLLESKGGSDLKRAVEAEGTISAQKLTT

SEQ ID NO: 112372 - protein, 47 aa, Gossypium hirsutum
  Clone ID: uC-gsflmaxxa028d08b1.pep
SLSWIYYNVIITPKLCLGSNVKSYSPLLTMLVAGLQSFSRTDEFPDA

SEQ ID NO: 112373 - protein, 83 aa, Gossypium hirsutum
  Clone ID: uC-gsflmaxxa028d11b1.pep
LLIVLLIPFLGMALSSSMKAPSFSESNRFGSLLMVIVYMVFLMVLLLCSRNLYKHMMVLLSLIRRSRRINNRIIFLPSEFSPP

SEQ ID NO: 112374 - protein, 89 aa, Gossypium hirsutum
  Clone ID: uC-gsflmaxxa028d12b1.pep
RWALVCLDPKAVVATGRGLLRTTVDREGKPLRKGALRVFATVHSDKDQRWSHSTNAPVQGSQELWLDPVAGFDLDCEEDDESVQEDTLS

SEQ ID NO: 112375 - protein, 182 aa, Gossypium hirsutum
  Clone ID: uC-gsflmaxxa028e05b1.pep
YFQKFIQFQLTVNVAALVINFIAAVSSGDVPLTAVQLLWVNLIMDTLGALALATEQPTNDLMDKRPVGRTEPLITKVMWRNLIAQALYQVAILLILQFKGKSIFGVSEEVKDTLIFNTFVLCQIFNEFNARNMDKKNIFKGIHKNRLFLAIIGITLVLQAIMVEFLQRFANTERLSLEQWGA

SEQ ID NO: 112376 - protein, 163 aa, Gossypium hirsutum
  Clone ID: uC-gsflmaxxa028e07b1.pep
FFKPQNNQECEGRKKELESAREQYIAVATELDAKKQELNKVRQDFDTALEVKLAAFQQAAEAQLSAKMHSERVTELTKQITVMKEAIKQVKFATQQVYKEQESIAADKEMLQKSYESAKEEAEKKLKAAREAYDPELARSLEEKLKETTEEVEAFKIEMKKVM

SEQ ID NO: 112377 - protein, 122 aa, Gossypium hirsutum
  unsure (1)..(122): unsure at all Xaa locations
  Clone ID: uC-gsflmaxxa028f12b1.pep
MAGEQLQVLNALDVAKTHWYHFTAIIIAGMGFFTDAYDLFCISLVTKXLLGRIYYNVDGAEKPVSLPPNALVAANGVVFCGTLASQLFXGWLGISXAKEVYGMTLMLMTYALLHKSFFGQYP

SEQ ID NO: 112378 - protein, 120 aa, Gossypium hirsutum
  Clone ID: uC-gsflmaxxa028g03b1.pep
MGQKLDTMRPKPSKDELLYQAAIAGNVDGIKSLCREGTGLEWIDRDGKTALIVACMNPELIDVAKTLIEMGANVNAYRPGRNAGTPLHHAAKRGLEQTVKLLLSRGANFLLRNDDCQTPL

SEQ ID NO: 112379 - protein, 102 aa, Gossypium hirsutum
  Clone ID: uC-gsflmaxxa028g09b1.pep
MAKLGLHKQIVGDLSLPDSSPFAKLLGSYIQSKSFLDIRRLHVRIIKSNFASETFILNRLIDAYGRCGSLEDAGKVFNRMPQRNTFSWNSVISVLTKLGYVD

SEQ ID NO: 112380 - protein, 61 aa, Gossypium hirsutum
  Clone ID: uC-gsflmaxxa028h09b1.pep
RTVNSLNQLLLLRYVIMRAMGFNPKELHGMTSGGYPSGRNGHVHGSNFGYGTAWTWRALLS

SEQ ID NO: 112381 - protein, 52 aa, Gossypium hirsutum
  Clone ID: uC-gsflmaxxa028h11b1.pep
ICFRRWISPMFREHLFKRRMDLVRLVRRGSSTHIRIIFLRCAIFTRKASGWT

SEQ ID NO: 112382 - protein, 37 aa, Gossypium hirsutum
  Clone ID: uC-gsflmaxxa029a01b1.pep
RIIIGSHSRRLIKSGHVSGSNAHRRNWDSLRILNQSR

SEQ ID NO: 112383 - protein, 48 aa, Gossypium hirsutum
  Clone ID: uC-gsflmaxxa029a04b1.pep
STTFPFKSRGKWVIPTVLGSEPTRYECHSAILLNEDWIMVITLGFHPR

SEQ ID NO: 112384 - protein, 41 aa, Gossypium hirsutum
  Clone ID: uC-gsflmaxxa029b07b1.pep
TNRGYTFKLYEKALDSLNEKELNADYATMNHFPCSEDPHFQ

SEQ ID NO: 112385 - protein, 79 aa, Gossypium hirsutum
  Clone ID: uC-gsflmaxxa029c07b1.pep
VLNEYVMDSTVAEAPACLQSLIFAEDLGFQRIMVEGDTLTRKADNTAHILAEEGKYHACSMYWIEEAPERVEREADQDR

SEQ ID NO: 112386 - protein, 56 aa, Gossypium hirsutum
  Clone ID: uC-gsflmaxxa029c08b1.pep
MPHIVHEAFSSNHTIHLDWGGRNKATAHSQTGPSLTQIHSRDTDRSMLDCTPHRSS

SEQ ID NO: 112387 - protein, 139 aa, Gossypium hirsutum
  unsure (1)..(139): unsure at all Xaa locations
  Clone ID: uC-gsflmaxxa029d09b1.pep
MVAFRFHQYQVVGRGLPTEADQHPKIYRMKLWATNEVRATSKFWYFLRKLKKVKKSNGQVLAINEIFEKNPTKIKNYGIWLPYQXSRTVYHNMYNEYRDTTSNGAVEQMYPEMASSYKVRVPCIXIIRTVTIPVKLLQE

SEQ ID NO: 112388 - protein, 131 aa, Gossypium hirsutum
  unsure (1)..(131): unsure at all Xaa locations
  Clone ID: uC-gsflmaxxa029e03b1.pep
LLALEYLHMMGIVYRDLKPENVLVREDGHIMLSDFDLSFKCDVCPKLLRRSKPNLEDNEDDDNFCLTPSCASPMQPVLSCFSSSNRKKKGSRVTTITRTSLIVRRRPRSWSXIGAEPLNAKSKSFVGTHEY

SEQ ID NO: 112389 - protein, 73 aa, Gossypium hirsutum
  Clone ID: uC-gsflmaxxa029g04b1.pep
VGIESKPDLSGPPPLQPSTAQLTTGQYGQTPPSTEIPTTRYNPSPLITQQVATELLQITPPFRSSGNSNQKKP

SEQ ID NO: 112390 - protein, 93 aa, Gossypium hirsutum
  Clone ID: uC-gsflmaxxa029h06b1.pep
RRRQARTFPLLSSIVLVFLHRSFGVGILFELLAVSGFTAKVSLFPLVTARSIGSVSNIDAAGRYFAISAPSATIKISIGGVTENSGDNFIYFR

SEQ ID NO: 112391 - protein, 93 aa, Gossypium hirsutum
  unsure (1)..(93): unsure at all Xaa locations
  Clone ID: uC-gsflmaxxa038a11b1.pep
MELGSVSKDTSWWVYTLPAFFGSKNLFDGYVLFSLFMAFLSIALFSWAFAVGGTAWKDGRYPYGTLSIGEPGXIRVFGSLFTLSPGLAHRALA

SEQ ID NO: 112392 - protein, 144 aa, Gossypium hirsutum
  Clone ID: uC-gsflmaxxa038b03b1.pep
PRVRNVTGIPYQWETCSDVVGYNWTDSPLSMLPIYQELIAAGIRIWVYSGDTDAVVPVTATRYSIDALKLPTINKWHPWYDNGKVGGWSQEYKGLTFVTVTGAGHEVPLHRPRQAFILFRSFLENKSMPSYLYSLSAVNKWKEF

SEQ ID NO: 112393 - protein, 151 aa, Gossypium hirsutum
  Clone ID: uC-gsflmaxxa038b05b1.pep
MNGTKRFALSSSAADANDSAFRNKRIMAGSPFDPQRAEPSQQQPNATPPLDPQRAELSRRHVKALNIQFASWVQSQLKNHPDELWQDGVSDYLSHASNIMEKFSDVVNWLTANADNGDSLSAAESHINESKMVPETKNTEISFFRENWITS

SEQ ID NO: 112394 - protein, 123 aa, Gossypium hirsutum
  Clone ID: uC-gsflmaxxa038b08b1.pep
MSPFLCFVLQAWNPSSCQVSSMETSRFLRDYAVWEINAFLWISLITITYFLSYKLFKLFKLWNQACKIPGPPSPSFYGHFTSLSKQNLTEVLSDSHEEYGSIVKLWVSPKQLLVSIKEPRIIK

SEQ ID NO: 112395 - protein, 75 aa, Gossypium hirsutum
  unsure (1)..(75): unsure at all Xaa locations
  Clone ID: uC-gsflmaxxa038c03b1.pep
MARNGGVAWMRTTEKIDGYDLSTSDTEEDHVLAVDDSLVDRKVIERLLRIFSCKVTAVXDSGRRALSYLGFVVEF

SEQ ID NO: 112396 - protein, 140 aa, Gossypium hirsutum
  Clone ID: uC-gsflmaxxa038c09b1.pep
LYSFILLDFAPRFSLYIYFFSSSRSLSDCRFEKKSLPLPMESSAVLGSFHHSVCAVSQAPCSLERPGTACMYSGGWPASRKSCLAGLIFGEKNCFPKQQIVTLISCMKTPDATGTVPSDSSKKGSLEKKTSPTATFSNGF

SEQ ID NO: 112397 - protein, 61 aa, Gossypium hirsutum
  Clone ID: uC-gsflmaxxa038d05b1.pep
KSSLTVKLARALASSESLPSVNFETVGPMSSSSSLTNLSKKSSSVVSSTWNGGFEAIDKIN

SEQ ID NO: 112398 - protein, 139 aa, Gossypium hirsutum
  unsure (1)..(139): unsure at all Xaa locations
  Clone ID: uC-gsflmaxxa038d08b1.pep
SVVRVVHSVYALSAEASIRAQRAQLVILDALNTGTQAFLDSNISXCQTSLIEVLAYRRHKNIECXNQLPADDVPCEPSANRNGXGNLCMGGICNKRDFEANTCRWNESEICYHRTHTDCAIGDGQIRVGPGVESGSGAT

SEQ ID NO: 112399 - protein, 41 aa, Gossypium hirsutum
  Clone ID: uC-gsflmaxxa038e02b1.pep
FAWVPLSISDDVLSLFKMKIILMILSFGKIYTVDLLYVVIV

SEQ ID NO: 112400 - protein, 175 aa, Gossypium hirsutum
  Clone ID: uC-gsflmaxxa038e07b1.pep
FTRPPTRPVLLFFQGFHQAFFLKLWVFKMNHCNLQQNATVSAYEELRGFISITDHQKGGAVVCTKPRRIQVLANNPTKPLRLHMSHQAEVSDSKAGADLLDIILNKEDLGTEEEQSIASSPPFFCGSPPSRAANPLVQDARFGDERLAQALSTLEIPSPSSPSSFARKGGCVRMK

SEQ ID NO: 112401 - protein, 97 aa, Gossypium hirsutum
  Clone ID: uC-gsflmaxxa038f06b1.pep
LLLCLIRTSIFCFNRCMIHCFAIDSPRESANIFQRELQLKIAQKVSKIPSSSFQLYFPLVSFFLSRSSFYSIFQNIHNELNIIYIYTHIHKKMIFYS

SEQ ID NO: 112402 - protein, 149 aa, Gossypium hirsutum
  Clone ID: uC-gsflmaxxa038f10b1.pep
HASAHASAETIENSNNHQASSVVEGMTPTHEAATLDDAPVENRDVEGQSGGNDSKNPIPEPVLSSTTESADIELVPQDGGALLQSPVVRDKEGDVAEIRHMVVDPCETKLSSLKDFTAESANRDSATEVDGGKQLSAGVQTTKIDNVEH

SEQ ID NO: 112403 - protein, 89 aa, Gossypium hirsutum
  Clone ID: uC-gsflmaxxa038g01b1.pep
RSRGRTRGRTRGGKSSMIAAMANLLDYDVYDLELTAVKENTELRRLLLDTSSKSIIVIEDIDCSIDLTGQRGKKTEKDGNEDEPSDPVT

SEQ ID NO: 112404 - protein, 151 aa, Gossypium hirsutum
  unsure (1)..(151): unsure at all Xaa locations
  Clone ID: uC-gsflmaxxa038g08b1.pep
MAATGPSLFVASPLVTSTAGNSVRNRCLSSFRAMAVSADQKSSPATVATRSTEKGRWLEEKNRKGRKEEEELTSNIYSNPQEITDENGNTLREYFQECKDLMIQSKAGPPRWFTPLECGSHAPDSPLXLFLPGIDGMXLGPFNIIINWERF

SEQ ID NO: 112405 - protein, 164 aa, Gossypium hirsutum
  Clone ID: uC-gsflmaxxa038g12b1.pep
MQLSTLSLFPFSVPKFLHIKASRERESRCYFTLNQGFNRSNKLSRYIVTRSQLGGTGILDATNSLSEIKPSPKFRGVCFYGMTVMAGVLPFGILIVAHPLALIFDPYKTKFYNLIPKLWATASIAPFFDIELEGLENLPPQNAPAVYVSNHQSIIDFYPPVTLG

SEQ ID NO: 112406 - protein, 99 aa, Gossypium hirsutum
  Clone ID: uC-gsflmaxxa038h04b1.pep
ISCLLVSSLLSDVPVSVSFSLLVFNIFKSFIYYLHLHNHLLQSIKHLFHFFWLKNVLWRKESIKISLSLLIIAPHYVFFFFLFMLNGSNDHSLTLPHLH

SEQ ID NO: 112407 - protein, 114 aa, Gossypium hirsutum
  Clone ID: uC-gsflmaxxa038h05b1.pep
FLNQSNFQADSEHSHLKKCVHDLLKMTSVEGNTAEPRKTSNPAANTAKIQSSSLSFRRWGRKYPFIRYGLPMISLTVFGAVGLGHLLQGSEYICCAENSIYHFNFEGQTMLWRK

SEQ ID NO: 112408 - protein, 110 aa, Gossypium hirsutum
  Clone ID: uC-gsflmaxxa038h10b1.pep
MRLKVRFGNRSTKMRKRQVVLRREEPPRSSSTNSSLTSRSVRYAECQKNHAAGVGGYAVDGCREFMASGEEGTTAALTCAACGCHRNFHRREVETEVACDCSSPPPFNGA

SEQ ID NO: 112409 - protein, 173 aa, Gossypium hirsutum
  Clone ID: uC-gsflmaxxa039a08b1.pep
MGLDALPRQQHNSSAQRCRFKGPSRHSSCHCEIPVESWEQDQSFPDEQMQCEVSPYEVPNKYKDVYEIWQQSPRTTYSRDSSPQKGRYSDNANENKMALVRQKFMEAKHLVTDEKLRQSKEFQDALEVLSSNRELFLKFLEEPNSTFSQHLNNFRCSSLPPSTKRITVLRPSK

SEQ ID NO: 112410 - protein, 64 aa, Gossypium hirsutum
  Clone ID: uC-gsflmaxxa039b03b1.pep
VDKKCPGESRFPAQVRVLTRKICEPLEEDSFRPILHHYDGPKFRLELNVPEALSLLDIFAEQDP

SEQ ID NO: 112411 - protein, 72 aa, Gossypium hirsutum
  Clone ID: uC-gsflmaxxa039b09b1.pep
ASRVIAYSVLHSIELYVACKSTVGSTRLGFNTCVTAETAFYSHDTIRGIPHGSSSGSGCSLSLSGVGSKRSA

SEQ ID NO: 112412 - protein, 97 aa, Gossypium hirsutum
  unsure (1)..(97): unsure at all Xaa locations
  Clone ID: uC-gsflmaxxa039b10b1.pep
MDIALASTAPKSPEAEPEPEPVSETPTRIQPTKPVSFTNGVLKRHKPYHHHHHYQAPPIVITYKECLKNHAASLGGHAXDGCGEFMPSPTATPTDPT

SEQ ID NO: 112413 - protein, 148 aa, Gossypium hirsutum
  Clone ID: uC-gsflmaxxa039d04b1.pep
LRVRPRVREAIWETLQPSRFLSFAIPNPNPTLNPSLASPLIRIAVLDSPIQPSSPLIPSVAAMIVPKHRESDWIFSTESGHLQLLLSSPNIQRLILIGQEQQPIINGSSSSSIYRRWIDPDSLNNLEISLKPLVIALSPKSYFHNENL

SEQ ID NO: 112414 - protein, 99 aa, Gossypium hirsutum
  Clone ID: uC-gsflmaxxa039d06b1.pep
IKGVGVFYFKRIELGFFQNLDFGFVLRFSAMESNAGTLETRSNKTALEREEVAALESLQFTDEIHCLMSAPATDNASSFTALLELPAPQAVQLIHSPDS

SEQ ID NO: 112415 - protein, 78 aa, Gossypium hirsutum
  Clone ID: uC-gsflmaxxa039d10b1.pep
KRKRVLMATTSMINHVKKTRRRHFEDKDWLSLSPFLFFFWLKADIFIDGLLMAATVRQRKERVMKAKSHASSKQSNRE

SEQ ID NO: 112416 - protein, 100 aa, Gossypium hirsutum
  unsure (1)..(100): unsure at all Xaa locations
  Clone ID: uC-gsflmaxxa039e03b1.pep
KKTTCYALAPLGLLTIRVTXSYNLTFRDKIASSSDPYVVITTTQQKVKTNVVKKNXNPERGDEVSLSIKDLNDPIELTVFYKDTLGADDPMGPAEIDLKP

SEQ ID NO: 112417 - protein, 159 aa, Gossypium hirsutum
  unsure (1)..(159): unsure at all Xaa locations
  Clone ID: uC-gsflmaxxa039f03b1.pep
FFVRRIPSSNQLDGETPGTRNVFEKVVVGHSPRRPRHSRKFSMDSTNSFISREMGSEFISDSPRCNFGSPRFNTSFKKMEXASEMDEISSTRRMDNASQVGDDMTDRVYTIDSVHNGVPYSGTRDHKSGFGISDNYAYTPREAFNLPDVCDPDIKKLYM

SEQ ID NO: 112418 - protein, 79 aa, Gossypium hirsutum
  Clone ID: uC-gsflmaxxa039f04b1.pep
MADIDGEAVEVGNNARSESPVRVTSSSTGVPPSLTVSASFKESGRKGSSRRKAVRPSSHAGNEFITLVYGSDPEKVELQ

SEQ ID NO: 112419 - protein, 122 aa, Gossypium hirsutum
  unsure (1)..(122): unsure at all Xaa locations
  Clone ID: uC-gsflmaxxa039f08b1.pep
ISSSSLALSPILRLSLFSLLFSSPSXXLLLPPLLTLFPLFPLPLRFNFFIGTLAMLPISRSFPLKRSLALVTARCGRSMIRSPVGIAAVVVVIGVTVMPAVAVSGAFGCVFIFVHSLGLVIN

SEQ ID NO: 112420 - protein, 55 aa, Gossypium hirsutum
  Clone ID: uC-gsflmaxxa039f10b1.pep
GKVKQKNINFLKMKKKKGKYEQSDTNRVSKAIYNAIKSFKTSRKVYQMTKKTIIL

SEQ ID NO: 112421 - protein, 170 aa, Gossypium hirsutum
  unsure (1)..(170): unsure at all Xaa locations
  Clone ID: uC-gsflmaxxa039f12b1.pep
FRAKKEAEEKNGESSASGTSKSGKRHVKPVDPDPYGERLLKTEDPLSEATKYLKLLQKNSPDSLETHLLSFEVNMRKQKILLAFQAVKQLLRLDAEYPDSHRCLIKFFHKVGSMPAPATDAEKLVWSVLEAERPSIWFSLKWXYXYQFQEKTLTEANEIFLRKHQDSLMH

SEQ ID NO: 112422 - protein, 52 aa, Gossypium hirsutum
  Clone ID: uC-gsflmaxxa039g02b1.pep
PSRASYTATSSFIFSRPRRTLSSGIERTTEVRRTFLWLGERPIYYPDCGKET

SEQ ID NO: 112423 - protein, 108 aa, Gossypium hirsutum
  Clone ID: uC-gsflmaxxa039h01b1.pep
DDSRLLWHASLSCAGQQTVCTAFVERDSSPLLESPLFFKCVTPTADATTCCQQEHRTDLDNSNIVCQCFQFILSKASKNHIIFVLLSLLQISYIDRNRQNASFLRCGS

SEQ ID NO: 112424 - protein, 108 aa, Gossypium hirsutum
  Clone ID: uC-gsflmaxxa040b02b1.pep
RFYREAMRKVLKFHLTRAQDRMKQMADKRRSEREFQVGDLVYLKLQPYRQHSLHKFKNQKLAPRYFGPFPVEARVGQIAYKLSLPSSARIHPVFHVSQLKNHIGSAVS

SEQ ID NO: 112425 - protein, 43 aa, Gossypium hirsutum
  Clone ID: uC-gsflmaxxa040b10b1.pep
TRQLQPHMLISFYSLIAKLKMTCLLSTLKTRICNIPFSTIKKE

SEQ ID NO: 112426 - protein, 49 aa, Gossypium hirsutum
  Clone ID: uC-gsflmaxxa040c06b1.pep
MHVLPICSRLLNQEIFRVSGMMANQGFGDLDRLRHRSPSPMASSNLMSN

SEQ ID NO: 112427 - protein, 168 aa, Gossypium hirsutum
  Clone ID: uC-gsflmaxxa040e02b1.pep
LSPVGSPSSGNISDSSSKEQDRFLPIANVSRIMKKSLPANAKISKEAKETVQECVSEFISFITGEASDKCQREKRKTINGDDLLWAMTTLGFENYVGPLKVYLNKYRETEGEKNSMARQEDHHHHHHHQSPTSYGLISHGGANEFNNVSAGISSSANAADHFQGYNSG

SEQ ID NO: 112428 - protein, 141 aa, Gossypium hirsutum
  Clone ID: uC-gsflmaxxa040e09b1.pep
FFTRPLSHCIRVFTVKWQLIRKKLEELSSGLMAIENCGSSSAQNIEVFSALVPSILVTVNECHCLARACVDLSYSGKLLMQSYLDVILAKFDNHVKDLSGFYTTGILSHGFAIVVSRPGVTAFKDDMRFYIRDLFTRMKNG

SEQ ID NO: 112429 - protein, 170 aa, Gossypium hirsutum
  Clone ID: uC-gsflmaxxa040f01b1.pep
FHSSADAWGHISRKNSKWLQENLTDMDTKVKQMIKLIEEDADSFARRAEMYYKKRPELMKLVEEFYRAYRALAERYDHATGVLRQAHRTMAEVFPNQVPMVFADDSPGGFAPEVDPCTPEMTPLVRAYLEPDELQKDAVGISSHAIKRNVAFSEESESPMSRKGLKHFMM

SEQ ID NO: 112430 - protein, 110 aa, Gossypium hirsutum
  Clone ID: uC-gsflmaxxa040g06b1.pep
HASAETDMETLVRSNFPRTNSRALDNPLSLSATPPNLANKTHYPRLHVRHELPKWWPQQLPQRNTASIFDSEYYQTKANRLIKAIIDNRLGGKDFSEEDIIQGIRCACLH

SEQ ID NO: 112431 - protein, 144 aa, Gossypium hirsutum
  Clone ID: uC-gsflmaxxa040h10b1.pep
FSTSSSKSRFLTKNKNFPGLKTLNPIKSRNWGLNVSAPFRVASVEEDEGRKERNHGINGFEEQEQEAGFDPGAPPPFKLADIRAAIPKHCWVKDPWKSMSYVVRDVAVVLGLAAAAVYVNNWIVWPLYWAAQGTMFWALFVLGM

SEQ ID NO: 112432 - protein, 57 aa, Gossypium hirsutum
  Clone ID: uC-gsflmaxxa040h11b1.pep
FVETLYISNKLLKSQKTDTNSKIYPKLKLLLFPLLPSFFNYFSSLYIVKRKNLFVIN

SEQ ID NO: 112433 - protein, 152 aa, Gossypium hirsutum
  Clone ID: uC-gsflmaxxa041a05b1.pep
MGKIESNLVNTPHFNPLNPQEFRKQAHEMVDFIADYYQNIESYPVLSQVQPGYLRANLPQNAPSLPESLETILEDVKNQIIPGMTHWLSPNFFAFFPSTVSTAGFLGEMLCTCFNSVGFNWIASPAATELEMLVIDWLADMLKLPKSFMFQG

SEQ ID NO: 112434 - protein, 58 aa, Gossypium hirsutum
  Clone ID: uC-gsflmaxxa041a07b1.pep
KTKYDLNLENISRIKTEDDYRRNICYNGTNSSSCQVQISPFLFFPFTSLYLLGTLKVL

SEQ ID NO: 112435 - protein, 141 aa, Gossypium hirsutum
  Clone ID: uC-gsflmaxxa041b09b1.pep
MDSSFEGVALDPSKCSKLSMDEKRELVYELSKRTSRASEMLQSWSRQEILQVLCAEMGKERKYTGLTKLKIIENLLKIVAEKNSGDHEGVTDPESHSSLSSGSRLSKRQRKADYPSRLPIPGNDPVIRNGSNGMINAIFCK

SEQ ID NO: 112436 - protein, 147 aa, Gossypium hirsutum
  unsure (1)..(147): unsure at all Xaa locations
  Clone ID: uC-gsflmaxxa041d06b1.pep
MKSLLFQFILVPFVILNFVNNVNAGITSRFIREEWPSVDIPLDHEVFAVPKGYNAPQQVHITQGNYDGNAVIISWITFDEPGSSKVQYGKSDTNYEFSAEGKMTNYTFYKYNSGYIHHVLVDGLEYDTKYYYKTXDGDSAREXWFQT

SEQ ID NO: 112437 - protein, 62 aa, Gossypium hirsutum
  Clone ID: uC-gsflmaxxa041d11b1.pep
YIIISNPIRHLIFINNSISTIYNHVQINFSKVQHIRINSTTYIHIPNNSARYNNSRIKFGNI

SEQ ID NO: 112438 - protein, 146 aa, Gossypium hirsutum
  Clone ID: uC-gsflmaxxa041e04b1.pep
MAFGLWFTLFELLLKLFLILAFVKKGSAGITSTFTRTKWQSFDIPLDHKVLAIPNGYNAPQQVHITQGDYDGKAVMISWVTADKPGSSRVQYGTSEKKYDFKADGTVANYTFYNYKSGYIHHCLVDGLEYETKYYYKIGEGHSSRE

SEQ ID NO: 112439 - protein, 102 aa, Gossypium hirsutum
  Clone ID: uC-gsflmaxxa041e10b1.pep
VNTNPPTRSICFSFLNLPPHAPPPPPSPPPRPPPAPAPPPAPPPKPAPPPSPPPAPPPAPPPKPPPSPPPAPPPAPPPKPAPPPSPPPAFRRLLRPSSSLGE

SEQ ID NO: 112440 - protein, 79 aa, Gossypium hirsutum
  Clone ID: uC-gsflmaxxa041e12b1.pep
TPRKISPFFFKTSKYPLQVLSIFTCLCEEPIPSIKPNYTIIKLLVKKLKKYHSFIYFSLKPHASAHASAHASAHASAHA

SEQ ID NO: 112441 - protein, 130 aa, Gossypium hirsutum
  Clone ID: uC-gsflmaxxa041f06b1.pep
MLNSGNNLSRGNAGLSSDMPPLPQCLPLEPISLGSQKYTRSGELSRVLGVPLRNSTSEDHSFGVSHPKPSPPVATEELKNFKESVQDTSRKARDRVKKLRESISKLERYREALSSKKRQRSDISSERTGV

SEQ ID NO: 112442 - protein, 96 aa, Gossypium hirsutum
  unsure (1)..(96): unsure at all Xaa locations
  Clone ID: uC-gsflmaxxa041g05b1.pep
MSRFWTVLSNLHALAGPVVMSLYPLYASVIAIETPGKEDDEPRLAYWILYSLLTLTEMVLQSALEWIPIWYTANLVFMAWMGLPQFXGAAFIYESL

SEQ ID NO: 112443 - protein, 172 aa, Gossypium hirsutum
  unsure (1)..(172): unsure at all Xaa locations
  Clone ID: uC-gsflmaxxa041g06b1.pep
YVLEVGADFYVSNLHKWFFCPPSVAFLYCNKSTTSSDLHHPVVSHEYGNGLPIESSWTGTRDYSSQLVVPAVLEFVNRFEGGIEGIMKRNHDQVVKMGKMLVESWGTNLGSPPEMSAAMIMAGLPSRLCLNSEKDALKLRSHLRDXYEVEVPIFHQVPKDXEEGVRNNDGFI

SEQ ID NO: 112444 - protein, 40 aa, Gossypium hirsutum
  Clone ID: uC-gsflmaxxa041h11b1.pep
LPHSLQCRLGSHISHICSRRPVSYPDVVLAPPIRGRTHEN

SEQ ID NO: 112445 - protein, 62 aa, Gossypium hirsutum
  Clone ID: uC-gsflmaxxa042a06b1.pep
TPPPKKKKPLPFFDTVITKDHIFYFRWGLRGKDKAIAFSPLPPPHLFIKKIETLLLIHRKIG

SEQ ID NO: 112446 - protein, 67 aa, Gossypium hirsutum
  Clone ID: uC-gsflmaxxa042a12b1.pep
FQSSFFLYRALPPECLSRFHRLPFFLWVSSLFPPFVRNLRGGGKVLEAVGFIFTPFTPPWNRELWPP

SEQ ID NO: 112447 - protein, 116 aa, Gossypium hirsutum
  unsure (1)..(116): unsure at all Xaa locations
  Clone ID: uC-gsflmaxxa042b01b1.pep
VLAMDSIXXIIIVTSLLSFSHLLLIKHAKGSKTYGILNDLYFRLTSLFKTSSLVEIYEQTCRKRAFTLPDRKLGVGKTKPLLPTFLLQEGPQLKYSIVGVSILEHNVHEKSLTRNK

SEQ ID NO: 112448 - protein, 143 aa, Gossypium hirsutum
  unsure (1)..(143): unsure at all Xaa locations
  Clone ID: uC-gsflmaxxa042b06b1.pep
MMTQIWSWSVGKMNSRGRNSFQSKKVPWKHEKEEAEMQGNKPTIATKTMKNRRASSKERKKALQQDVDKLKKKLRQEENIHRALERAFNRPLGALPRLPPYLPPPTLELLAEVAVLEEEIVRLAEQVVHFRQDLYXEAVYTST

SEQ ID NO: 112449 - protein, 106 aa, Gossypium hirsutum
  Clone ID: uC-gsflmaxxa042d03b1.pep
MGCVFGREVSSGIVSESRASRNASFESNRKVEHVTVAKTDASAVGVENEGTQKEETSDGERKQTGERRRSKPNPRLSNLPKHSRGEQVAAGWPSWLSDACGEALNG

SEQ ID NO: 112450 - protein, 67 aa, Gossypium hirsutum
  Clone ID: uC-gsflmaxxa042d10b1.pep
CKRESCIDLLLGWFVLVGTERLKPMQLYFQSFSLCSNLYGFLTHFVLDWLLIFLSNLEGKKNRTREQ

SEQ ID NO: 112451 - protein, 71 aa, Gossypium hirsutum
  Clone ID: uC-gsflmaxxa042e07b1.pep
QFYESVSSKARSKPRSPSRSSSNEEDPGQRLEARLQAAEQKRLNILAKSQMRLTKLDELRQAAKTGVKMPF

SEQ ID NO: 112452 - protein, 116 aa, Gossypium hirsutum
  unsure (1)..(116): unsure at all Xaa locations
  Clone ID: uC-gsflmaxxa042f03b1.pep
SFRGETVTLAQKLDAEIQSMPDAHPFEETRYCNTGNSQFAGQQSVARFGEDRELCDHXAIMDRRERQGRLRAEYIELTRAISEQRLRRATSAYIRRQRVKGLRDTMAAVMEARAGF

SEQ ID NO: 112453 - protein, 139 aa, Gossypium hirsutum
  Clone ID: uC-gsflmaxxa042f06b1.pep
FSSAHASEKSKIHGFPAGLCTSLGVGGHITGGAYGSMMRKYGLGVDNVIDARIVDVNGRVLDRAAMGEDLFWAIRGGAGGSFGIILQWKIQLVPVPSTVTVFTITKSLQHNSTKIFHRWIEVADNLDNDLFIRVNHPTA

SEQ ID NO: 112454 - protein, 106 aa, Gossypium hirsutum
  Clone ID: uC-gsflmaxxa042g01b1.pep
MLLSWATSIGGSAVECTTVRELISFCATFISNGSPDPYPGTPCCEAVTNLYMMTHSTDNRRSLCGCLMGLVTANNSNSTAIATLPGFCGVPLGFTIGPDTDCNFVP

SEQ ID NO: 112455 - protein, 77 aa, Gossypium hirsutum
  Clone ID: uC-gsflmaxxa042g04b1.pep
PVKISTLMCCNNFFMSKATDNKNPSFGFIENTRQHELCQYLNDIYDIPFAVYPSPSYTLYHFELQSLSERVKSNPTK

SEQ ID NO: 112456 - protein, 152 aa, Gossypium hirsutum
  unsure (1)..(152): unsure at all Xaa locations
  Clone ID: uC-gsflmaxxa042g06b1.pep
MESGAAVVELQRNSTNFANIVEEIVKLEKKIFPKHESLARSFDQELRKNNTGLLYMMDLHGEVVGYVMYSWPSSLSASITKLAVKESRRRQGHGEALLKAAIHKCRTRNIHRISLHVDPLRIPAMGLYKKXGFQVDSSIKCYYSXDRDAIGC

SEQ ID NO: 112457 - protein, 89 aa, Gossypium hirsutum
  Clone ID: uC-gsflmaxxa042g10b1.pep
MKKIVLKLDLHDDKAKHKALKTVSTLSGIDTIAMDMKAQQLTVIGTVDPVNVVSKLRKNWSTTIVSVGPAKPPEKEEPKKEEPKKEEPK

SEQ ID NO: 112458 - protein, 65 aa, Gossypium hirsutum
  Clone ID: uC-gsflmaxxa042h08b1.pep
MGNLSFVLGIIGNVISILLFASPIKTFWGVIKKKSTGDYKGEPYITTLLSTSLWTLYGIINPDGL

SEQ ID NO: 112459 - protein, 75 aa, Gossypium hirsutum
  Clone ID: uC-gsflmaxxa043a07b1.pep
IIWKHCTVLRLAVVVWWKHENLRTYTVKIIATERPAVNSTEPRSCCIKDDHRHTRTSPEHRNYTLTTTCLIENDR

SEQ ID NO: 112460 - protein, 63 aa, Gossypium hirsutum
  Clone ID: uC-gsflmaxxa043a08b1.pep
CLRCSRQLVDMIHCYKLTSIHHICELGKKYEDLCIHFGICFHVENMIRFPTKGRAIAIHSFSK

SEQ ID NO: 112461 - protein, 56 aa, Gossypium hirsutum
  Clone ID: uC-gsflmaxxa043a09b1.pep
INGRCTLKLSLCRAYRPPTVHFSIYVPSRLCRSVIVNDWLNGRTNAKKMAGGSFSS

SEQ ID NO: 112462 - protein, 64 aa, Gossypium hirsutum
  Clone ID: uC-gsflmaxxa043a10b1.pep
LCRKGGLNQWSCKWNLILQEVQHVEWLGRGRYRLEERFLKRVHGVFPTMVLKDPRAIVCVGVRE

SEQ ID NO: 112463 - protein, 135 aa, Gossypium hirsutum
  unsure (1)..(135): unsure at all Xaa locations
  Clone ID: uC-gsflmaxxa043b01b1.pep
HGQGFDDFDDEDYINSYKVDSQQNNPRQKASSNVYVDKEVFSEPERSRGSNFVRKNIALSGSEDDLYFDSHEELSAHPNWKSSHVANSKHIGRIASKDLSFDSEDHDLDSDGDDGXAISGPNSGKRTNGVMVEAN

SEQ ID NO: 112464 - protein, 128 aa, Gossypium hirsutum
  unsure (1)..(128): unsure at all Xaa locations
  Clone ID: uC-gsflmaxxa043b04b1.pep
FVTMLGSRETSLANPPDDDQDAISICRHAKGEDRNWESDTGTSVISGANLAIWLLSVLACHDEKSKITIMEAGAVEVVTQRISQRSSQYAQIDFKEDNSIWICAVLXXILFQDRDIIRAHGTMKSLPV

SEQ ID NO: 112465 - protein, 94 aa, Gossypium hirsutum
  Clone ID: uC-gsflmaxxa043b06b1.pep
MDTYTVHLAMAALVGASLVAVSAYYMHRKTLNQLLEFAKTVEREREDISEGEESPQPQHSKKRRGQHFRWKGNGYYRRGSASLPDVTVISGGFD

SEQ ID NO: 112466 - protein, 49 aa, Gossypium hirsutum
  Clone ID: uC-gsflmaxxa043b08b1.pep
GCKTSRLICGNKAVVLGFMPTQAGTRYRKLNFFYRAATVLRGCAGQRLK

SEQ ID NO: 112467 - protein, 153 aa, Gossypium hirsutum
  unsure (1)..(153): unsure at all Xaa locations
  Clone ID: uC-gsflmaxxa043b09b1.pep
FKVSRHLFRWXKEVAYADYYERALTNGVLGIQRGTEPGVMIYMLPQGRGVSKAVSYHKWGTPFNSFWCCYGTGIESFSKLGDSIYFEEEGSIPSLYIIQYVSSTLDWKSGKIVLNXKVIPVVSSDPYLRVTLTSSXKEGSEQLSTLNXRIPIW

SEQ ID NO: 112468 - protein, 38 aa, Gossypium hirsutum
  Clone ID: uC-gsflmaxxa043b10b1.pep
PITVADEYSDVPVSDLLIGMLSFSMRKMIKGVVDHHLV

SEQ ID NO: 112469 - protein, 99 aa, Gossypium hirsutum
  Clone ID: uC-gsflmaxxa043b12b1.pep
PMCDAASLGVVLSMQNVFPCCEGVCVLKHPRAIRCQCDSTERSLPSFECWRALTCLLVVKFGVSISFHSVFLCQCRMFCRSQRIDNNVNQGFHVLTHWL

SEQ ID NO: 112470 - protein, 42 aa, Gossypium hirsutum
  Clone ID: uC-gsflmaxxa043c12b1.pep
KGAPHLFFLFSLVVFFFFFFFFFFFLFFFFFFFFFFFKLINL

SEQ ID NO: 112471 - protein, 93 aa, Gossypium hirsutum
  Clone ID: uC-gsflmaxxa043d01b1.pep
LCKFYSLSIVPHQIPHYPFLTFFFFNPFIFLIPFFSFFFTPMLPPNPSLFHAKPSPLLPLLYRTPFTCLTAAGDAPSGPTFHKWFQYPTTTTT

SEQ ID NO: 112472 - protein, 157 aa, Gossypium hirsutum
  Clone ID: uC-gsflmaxxa043d07b1.pep
STRPAGRSELCKNLPPFVIVLHQIPHYPFLTFFFFNPFIFLIPFFRSFFTRMLPPNPSLFHAKPSALLPLLSRTSFRCFAAAGDAPCGPTFHKWFQFPTTTTTSDNVYRGGARIGQEISYEAPAGSSIKVKKWSRDTESYLTNDDEPLALPMTYPDT

SEQ ID NO: 112473 - protein, 100 aa, Gossypium hirsutum
  Clone ID: uC-gsflmaxxa043d08b1.pep
FYASGSELALRAVSGSGTAWTQEFKTCVCGTIKREYSIDIGTREAKTKQPSAVANGKTWARNDINSVKLIMVNRKLMSDTPHSLTSETTLTGFHFKTTAL

SEQ ID NO: 112474 - protein, 69 aa, Gossypium hirsutum
  Clone ID: uC-gsflmaxxa043e02b1.pep
RHRNIYAGPLFKFYKSYPCLYWSWFSIFYPMQCQIFHYSNMLSNRSASYVANLCHLIFFKSHLNLEVNI

SEQ ID NO: 112475 - protein, 53 aa, Gossypium hirsutum
  Clone ID: uC-gsflmaxxa043e12b1.pep
GRVECPSRIWCIYTALSAELPPALNLEPLTPFRSITRLYLSNRHQCPITRRQY

SEQ ID NO: 112476 - protein, 104 aa, Gossypium hirsutum
  unsure (1)..(104): unsure at all Xaa locations
  Clone ID: uC-gsflmaxxa043f03b1.pep
SSDGQHAAVVPYWWVAEVMLGELWFPIIEIAVFYDSQTHVDMKDCLPQAAYPXGFFSATSIIRLGSFKGSVDIVXRMVFGIDICSIXAFTHWWHSVFMLSLSSS

SEQ ID NO: 112477 - protein, 158 aa, Gossypium hirsutum
  Clone ID: uC-gsflmaxxa043f07b1.pep
MNPENEHDPQNNFKFKLKALNLLFLAFLAMILDPFCTFSIHDLVQIIRHDNLKTITISSFSLIFLVTLYFRNRRRKVYLLNFACYKPKPDQICSKERIMKIFAGTGKFTEESLAFQKKIMEKSGVGDKTCVPRAMMAASVEKGIAAAKKETEEVIFGA

SEQ ID NO: 112478 - protein, 116 aa, Gossypium hirsutum
  Clone ID: uC-gsflmaxxa043g01b1.pep
GPCMPSSIQPGVGSRFLKVVVEGDSLSVIKKANSSGDDRSTIGAYIQDIRIVRQGLKKCEIVYAPHEANRPVHFLAQEGWRRGEGLNLEYDYLVEMVALNCGGDGEDDADGAMASG

SEQ ID NO: 112479 - protein, 153 aa, Gossypium hirsutum
  Clone ID: uC-gsflmaxxa043g09b1.pep
STRSCLPSIPPPINPDAAVIIVINHRIFIIIQIFIDHMGEQASGQPQPQAQSQPSNDSYDATQCQTQRQAQTQTKTENSNDAFAAAVPTVTTALVVSASTELTGGSPLTSSPPSKIPSRPRKIRKLSPDSNSEPNASQQATTSTTSTSVAVPL

SEQ ID NO: 112480 - protein, 124 aa, Gossypium hirsutum
  Clone ID: uC-gsflmaxxa043g12b1.pep
MVVATLPSCQTCGSPEPSPPAPEPEAFPPEPEVPEPYPPELAPYTEPDQSPEPSEAPIDDDGVFDVTNYGAEADGRTECSSAFSAAWHATCDYTRNSTIYIPEGTFLGGPISFRGPCYNDRSLT

SEQ ID NO: 112481 - protein, 69 aa, Gossypium hirsutum
  Clone ID: uC-gsflmaxxa043h01b1.pep
TSLHCFSFQNISSPLKAYLLLLLLLLNLEGEMAFIHQTPSLEVFSSAAYTRKITPPTPSTSRFSLPFTF

SEQ ID NO: 112482 - protein, 151 aa, Gossypium hirsutum
  Clone ID: uC-gsflmaxxa043h03b1.pep
FTRGLGAIMYEMLIGYPPFCSDDPRITCRKIVNWRTCLKFPEEPKISPEAKDLICHLLCDVETPLGTIGVERIEGTSIGSKGVPWEKLYEIEAAYKPTVTGDLDTQNFEKFPEIDGPSSSIPEVGPLRKMLTSKDNNFIGFTFKKSDVVKS

SEQ ID NO: 112483 - protein, 83 aa, Gossypium hirsutum
  Clone ID: uC-gsflmaxxa045a01b1.pep
NQRLLGTITFHSLVVHLAMLIARTLPEYLRFLTLLRDTRNHQPGFEPVHRPHELLNKASDRLQPLNSQQEPIQLLSRSCSRWL

SEQ ID NO: 112484 - protein, 49 aa, Gossypium hirsutum
  Clone ID: uC-gsflmaxxa045a04b1.pep
EKVCWKDTSEGDEIFRLLRSFGDAAFGLFYAPAGWRPCCRRPNVLEDQE

SEQ ID NO: 112485 - protein, 113 aa, Gossypium hirsutum
  Clone ID: uC-gsflmaxxa045a10b1.pep
HSSGNPAEAKLETTGSLIDFDADPEPAEAPMVTQTQQTTATESIVHPTSCTNENWTSIDVYPQTNVSQTSSNVNTVDSDLSQLSVPVSEPGHLSGVPSGVGGQKPAHDANMNM

SEQ ID NO: 112486 - protein, 71 aa, Gossypium hirsutum
  Clone ID: uC-gsflmaxxa045b04b1.pep
TISRSFSSKKKMSADSSNLKRSFNSNSSNNQSNINKKRKSKQKTLGMAWGSNSISSSRSSFRVKCQWGNVR

SEQ ID NO: 112487 - protein, 134 aa, Gossypium hirsutum
  Clone ID: uC-gsflmaxxa045b10b1.pep
RFEQIDHFQRIQSRTGNPFNSVLFFDDEDRNIQAVSECDNQKKPEKRFVTLEEIGKRNTSAGNTVDGTQLDAEIAGPENINVTIYSFYILKQYKKVTYAIPTNDSAQFVHLICNMITKCLMLARKKDGAYGTGK

SEQ ID NO: 112488 - protein, 86 aa, Gossypium hirsutum
  Clone ID: uC-gsflmaxxa045b12b1.pep
WLEMFPVFVLFLVCSATANLHRACIALSSSTSATGVSPPAIVQYPLSGVNIINNSVTAKNDKAKFFNLFFACMIRFFYKYFGRVNE

SEQ ID NO: 112489 - protein, 90 aa, Gossypium hirsutum
  Clone ID: uC-gsflmaxxa045c02b1.pep
RWCLRKREMASGIKDALATLTESKPARLTSGVWSVLEQINAYPTNMDAVGPMEALNLTRWTRPGVDIDEDRALTGRAEKDTQNLCLGGSN

SEQ ID NO: 112490 - protein, 80 aa, Gossypium hirsutum
  Clone ID: uC-gsflmaxxa045c07b1.pep
VDTDRSAGTHGSDIRTLLFVILAYITQYDGLLLVIQRVGFLEFFITCFHLRARALQLCSADLNQVQTFSLSLGPTLFILV

SEQ ID NO: 112491 - protein, 146 aa, Gossypium hirsutum
  unsure (1)..(146): unsure at all Xaa locations
  Clone ID: uC-gsflmaxxa045c09b1.pep
LLGPEHKRLVQTIALSQHQLRTILDDSDLHTITDGCVYLEMIESTLRAALTASISQVMAMSNGKAFRLGNDTXNDXLSETLYGDSVXTXQVLADFLLLSDNHTAHGSQLDDVANLTTDQYRLSVQHAHMEVTITHARGGLPETMLN

SEQ ID NO: 112492 - protein, 89 aa, Gossypium hirsutum
  Clone ID: uC-gsflmaxxa045d03b1.pep
GVASVRQNKGSGGKCWAAPLLVNSCGYFRGAERSAWHGIAGCYTGRCTVNIYHTLRQVHPQLGLYVIGSGFNRISAKVIDHPLDRAHTR

SEQ ID NO: 112493 - protein, 59 aa, Gossypium hirsutum
  unsure (1)..(59): unsure at all Xaa locations
  Clone ID: uC-gsflmaxxa045e01b1.pep
MAGKAIESVHCXSRKKTAGAVTHCMRGRGLIKSNGCSIELVEPKILRYKAVYPILVLVR

SEQ ID NO: 112494 - protein, 108 aa, Gossypium hirsutum
  Clone ID: uC-gsflmaxxa045e07b1.pep
LLRPSLTIFCLQGASCLGLRENGITTTPDRCKARDTSRPEVDHRTLEGAPYHQTCFQCRHRKGNLVMNTYSIMDGELHCKRHFEQLFNECGNFSMNFQTVMTEKLNDA

SEQ ID NO: 112495 - protein, 68 aa, Gossypium hirsutum
  Clone ID: uC-gsflmaxxa045e08b1.pep
HRSGSSWGTLCHILGNRCQGNPYRSIVPIGHGRYNDHWYGESPTHEQRRPRHRQHRRTACQPYLWMPV

SEQ ID NO: 112496 - protein, 91 aa, Gossypium hirsutum
  Clone ID: uC-gsflmaxxa045f06b1.pep
LKFKYLDFRVSCVQRLKNRMWKHLLVRFQPPMVSINMTPLDSGVNSTYAPTGWCEKLQFLTHAHTYILFIYNMVMGLHLSYVKLQRFKSCM

SEQ ID NO: 112497 - protein, 55 aa, Gossypium hirsutum
  Clone ID: uC-gsflmaxxa045f07b1.pep
RSLRSRWHVSQVKDQGLVCTGHDFPSYLGYMSYTPCALQLQVRVPEWALLPLMRV

SEQ ID NO: 112498 - protein, 103 aa, Gossypium hirsutum
  Clone ID: uC-gsflmaxxa045f09b1.pep
MGSPGLGTGNSGQRLGITEPISLGGPTEYDVIKARQLEKYLQNVGLYQSQKEAVSREEVLGRLDQIVKNWVKAISRAKRLNEQLVQEANAKIFTFGSYRLRVH

SEQ ID NO: 112499 - protein, 54 aa, Gossypium hirsutum
  Clone ID: uC-gsflmaxxa045g03b1.pep
EHAIGSVKSESTLAFSLGLSTSPCLAAFLIRSPVTVTLYPHVSEFIAFYLFLFI

SEQ ID NO: 112500 - protein, 144 aa, Gossypium hirsutum
  Clone ID: uC-gsflmaxxa045g08b1.pep
ECPGISGICGSCGTCPLSGICGICGIWRICAILRISEFLGNGRCKPLVVHITGSSSSAPCFRATFRTKPKSTNFGAFWASMIFVNANPRSIELGRVECINGRNSYHVAVVINGLCLEHLNTLPVAYGARHRRRRLRRLVYKRHR

SEQ ID NO: 112501 - protein, 140 aa, Gossypium hirsutum
  Clone ID: uC-gsflmaxxa045h01b1.pep
CLGRGCIYASTSTMGFSPSTSTGQSWTMRVKSINDCRGGLPAHDISMDRLKTTLKETSMIDETEPQPIGLTSMLNWIIVSQHTLGRITGEAIHDHGLSQSRESCGLTAARLAISPGRRDAELAYLATIVGLYISDVPPAA

SEQ ID NO: 112502 - protein, 134 aa, Gossypium hirsutum
  Clone ID: uC-gsflmaxxa045h04b1.pep
SYSIVGVGLLGTFTYRHKYKINQVSFSSSTPSSYYCRATLSTTMEEVKPTFDSDKAAVLVNELRKTFNSGKTKSYEWRISQLESISKMIDEKEKEIVEALQKDLSKPELEAFLSEILMARSSCKLALKELKQWM

SEQ ID NO: 112503 - protein, 95 aa, Gossypium hirsutum
  Clone ID: uC-gsflmaxxa045h06b1.pep
VDVRKPLKRRKKIMISDSNFTYAKFKYEKITLFCFLCGCLGHGNNFCPVRLQHGMQEMEIGWDLTFRAQPRKATTVNSIWLRGERENIFFWKDTI

SEQ ID NO: 112504 - protein, 162 aa, Gossypium hirsutum
  Clone ID: uC-gsflmaxxa045h11b1.pep
FSRVRGYGPNEVLIAIIGSQFMYRGLWLEHALILQALLPLFADFSSDNDSISHPKIIVLSSDSASNYSMAVEKIALNLRYPSGVVKHVAVHGDVDGVLSMTDLVIYGSFLEEPSFPEILIKAMSHGKPIIAPDLSNIRKYVDNRVNGYLFPKENISVLTQII

SEQ ID NO: 112505 - protein, 70 aa, Gossypium hirsutum
  Clone ID: uC-gsflmaxxa046a08b1.pep
YPLLDNSSASSSLMYVLALCPARALVVGSASKSLYFKVEMLLVIRVGIDRFPRLNGAIWHEPDVPNYAIV

SEQ ID NO: 112506 - protein, 85 aa, Gossypium hirsutum
  Clone ID: uC-gsflmaxxa046a09b1.pep
VALLLLLALCNAIKIHGEESNGLCDVNLTLRSRPHSVSILEFGAVGDCKTLNTIAFQNAIFYLKSFADKGGAQLYVPPGEGLLEV

SEQ ID NO: 112507 - protein, 136 aa, Gossypium hirsutum
  Clone ID: uC-gsflmaxxa046b05b1.pep
LYHHADIRRHFEAFAWAYISQQCRPRDVWEGILLKLITPSKEEKEEILRMRDEELAKKLYKVQQEKKCLIVIDDIWTSEAWETLFPAFPDETTVGSKILLTTRNRKVALDADQNGFLHEPECLNEEQKLELFQLKA

SEQ ID NO: 112508 - protein, 167 aa, Gossypium hirsutum
  Clone ID: uC-gsflmaxxa046c03b1.pep
KGSSSSGSLESEKVVQLNNHTVSRMEPSSCPNPALNMCAGTHYAEAKQSFTNTEVSECANSVEKSGESGEVSNSFDLGESRKTSLYRESTGSDVSDESSSSFLSSTVYKPHKANDIRWEAIQAVRSQKGDLDFKHFRVLKRLGCGDIGSVYLSELTGTKTYFAMRLW

SEQ ID NO: 112509 - protein, 163 aa, Gossypium hirsutum
  Clone ID: uC-gsflmaxxa046d02b1.pep
MGSLVGHVLPGLAFFLLGFWHLFNHIKLHSLHPNPYTSPTWFPTPKSRHLELFLIMVASSISISMELFISPARHQPLDPDGTIPSTHLHNFEHSSISMTFFTYAAFAIILDKISPKAKHSLTQFIAAVAFAQQLLLFHFHSADHMGVEGQYHLLLQTLIFVLY

SEQ ID NO: 112510 - protein, 125 aa, Gossypium hirsutum
  unsure (1)..(125): unsure at all Xaa locations
  Clone ID: uC-gsflmaxxa046d09b1.pep
HAYGELPEQDRRVSQILSHHAGIRTTRGSGGGRLRPREDSSNTLIDMEAVTCAKAHQHIDDWSRGYGDMKHXVYDEADTILDRACEADTHTQTETVGHRAIKPNGRRLRTIFVTAALTEAAPKLI

SEQ ID NO: 112511 - protein, 136 aa, Gossypium hirsutum
  Clone ID: uC-gsflmaxxa046d10b1.pep
CKLVHFIETHAVEFQEQLHFALAFTITIAILVVTILVKGNKRQKRRPPEPDGALPFIGHLHLFGKNQLLHRIFADMADKHGPAFLIRLGVRRALVVNNWEVAKECFTTNDKVFSTRPKSIAVKYMGYDYKMLGSLL

SEQ ID NO: 112512 - protein, 166 aa, Gossypium hirsutum
  Clone ID: uC-gsflmaxxa046e05b1.pep
GIFERHWGIFNYDGSIKYPLDLGKGKALTQAKGVKYLARQWCVLSPSAGVSDPNALAQSISQACQYADCTSIGPGSSCSNLDPQRNASYAFNMYYQTMDQRKDACSFNNLSTVTTVDPSQPPCRFEIMIDIGKHELSVSNKVPAAGFGSLLLVSLMLVLGLANGVH

SEQ ID NO: 112513 - protein, 73 aa, Gossypium hirsutum
  Clone ID: uC-gsflmaxxa046e11b1.pep
FHIKTYSRAPSFWSIVRLLSALLNIPDSSMVLMKMESFKEGDCKLLNDNSPADTSFITSDSSKPLAGPRLHSS

SEQ ID NO: 112514 - protein, 131 aa, Gossypium hirsutum
  Clone ID: uC-gsflmaxxa046g10b1.pep
VYCNNEFCAAAHDGKLKDCEPDLQCEYYVTYGDGTSNGGYFVKDTIELQQVTGNLQTSPTNGSIVFGCGSKRAGQTTTSSESVDGIIGFGQANSSMISQLAQNGVVKNKFAHFLDNVDGGGIFAIGEVVGP

SEQ ID NO: 112515 - protein, 76 aa, Gossypium hirsutum
  Clone ID: uC-gsflmaxxa046h09b1.pep
RLQVYENLSSQVLWVDDPPKILCTLSKITNIHYFSWSFASFHNDSANLHDFSLKSRSKQAFLYPLLSFLGSSDKAD

SEQ ID NO: 112516 - protein, 142 aa, Gossypium hirsutum
  Clone ID: uC-gsflmaxxa046h10b1.pep
RGLKKSPGCSWIEVGNGIHTFMARDKCHPECHHITKKLDQITEKLEKEGGYIAQTKFVLHNVEENEKVKMLYGHSERLAIAYGLLKTAEQTPIRVTKNLRVCGDCHTFCKLVSKLFGRELLVRDANRFHHFEDGACSCGDFW

SEQ ID NO: 112517 - protein, 65 aa, Gossypium hirsutum
  Clone ID: uC-gsflmaxxa046h11b1.pep
NECLISIALEAYIQVFRTHKDAYFFVWISRLECSSLSELWKLIATNGGRSSFYGNLNRGDYGECQ

SEQ ID NO: 112518 - protein, 38 aa, Gossypium hirsutum
  Clone ID: uC-gsflmaxxa047a05b1.pep
LVSYLTLCALYLYSIKTATMHTELLFSSQLMSSFLVCI

SEQ ID NO: 112519 - protein, 100 aa, Gossypium hirsutum
  unsure (1)..(100): unsure at all Xaa locations
  Clone ID: uC-gsflmaxxa047a11b1.pep
QNLVQSSTIVAPGYVPSELDERILLELPSSMVRPLRVIRGTFQVTSKKINFVVDKTECNISMDGSEDNSEAKNDEKDRSWLMTSLQXMYSRRYLLRRSAF

SEQ ID NO: 112520 - protein, 52 aa, Gossypium hirsutum
  Clone ID: uC-gsflmaxxa047b06b1.pep
WLLWSWPSRTWQGWRTFSSGVFSSYAMMSFEALYNCDRIRNSLGNIRKHNYS

SEQ ID NO: 112521 - protein, 89 aa, Gossypium hirsutum
  Clone ID: uC-gsflmaxxa047b10b1.pep
LSGKKAGSSTRGILGETEGQRLCESFRENQYPDRATKERLGKDLDMTFRQVSKWFENARWSFNHPTSNQETTAKRVAENAITSVVPKKN

SEQ ID NO: 112522 - protein, 48 aa, Gossypium hirsutum
  Clone ID: uC-gsflmaxxa047c05b1.pep
RVDPWIGIGSTYSRPSSVEQLRSTRHSPKTSNDFLLRIYQSNFPFNRE

SEQ ID NO: 112523 - protein, 154 aa, Gossypium hirsutum
  Clone ID: uC-gsflmaxxa047c10b1.pep
NIAGIPFGYRGFSDKGLAEMPLSRKVVQNIHLSGGSLLGVSRGGPSVSDIVSSMEERGINMLFVLGGNGTHAGANAIHDECRKRKLKVAVVGVPKTIDNDILLMDKTFGFDTAVEEAQRAINSAYIEAHSAYHGIGVVKLMGRSSGFIAMQSFL

SEQ ID NO: 112524 - protein, 47 aa, Gossypium hirsutum
  unsure (1)..(47): unsure at all Xaa locations
  Clone ID: uC-gsflmaxxa047d08b1.pep
PCVRFDAISSDSSTATKFRERIYDMGKVMESSIHNNIRCNKYRRSLX

SEQ ID NO: 112525 - protein, 72 aa, Gossypium hirsutum
  Clone ID: uC-gsflmaxxa047d12b1.pep
MWSFASNCVAGTVGRKNVFLNQTHAALECSDDEGPSVISRDECLECPICCESFNIVENVPYVLWCGHTLCKN

SEQ ID NO: 112526 - protein, 90 aa, Gossypium hirsutum
  unsure (1)..(90): unsure at all Xaa locations
  Clone ID: uC-gsflmaxxa047e10b1.pep
MINRPLPPAMSFLNDLFNLNLSDIDSKIIAEYIWIGASXMDLRSKVRTLSGPKPDPLKLLKWNYEGSSSNQDPGDDSEVHHYSQAIFKVP

SEQ ID NO: 112527 - protein, 85 aa, Gossypium hirsutum
  Clone ID: uC-gsflmaxxa047f01b1.pep
MQRETSNGVAAAAAAASRVHPACAACKHQRKKCDENCILAPYFPADKCREFQAVHKVFGVSNATKIVRNANSDEDLKKVADSLIW

SEQ ID NO: 112528 - protein, 174 aa, Gossypium hirsutum
  unsure (1)..(174): unsure at all Xaa locations
  Clone ID: uC-gsflmaxxa047f04b1.pep
KDSHSNRDSSAFGNKSKTGNRRLGVNKDYPLCQHCGKKCHPPFKCXEKTRCXCNKCNQMRHEVVICKYKNXSNKEMKCKWQIKKKKISFLXVTYFTSYETSKSWLIDNGFTNHMTHDKKLFKNLKSTEFKKVRIGNGDYTAVKRNIAIISCSGTKFITDILYAPDIDQNLLSVE

SEQ ID NO: 112529 - protein, 86 aa, Gossypium hirsutum
  unsure (1)..(86): unsure at all Xaa locations
  Clone ID: uC-gsflmaxxa048a05b1.pep
MRPMTISGTTATCMVCHKKGAVIDXLTGDGISHHKTGLKXTHCQVVLVMGNYCSTDRVLSCKPYYDQPLLASWTYQIRNAKPSSEN

SEQ ID NO: 112530 - protein, 156 aa, Gossypium hirsutum
  Clone ID: uC-gsflmaxxa048c03b1.pep
MQEINHPYGFNDGANIGNSVSQLILSGGSNTLDSIFSRCEPSIAAVGTNSVYEPLGSSVYLRQRDLLLKFCQGNASFSRNSVADQLRKSQNTASTSNCVSPQKTKLYRGVRQRQWGKWVAEIRLPQNRVRVWLGTYETPETAAYAYDRAAYKLRGE

SEQ ID NO: 112531 - protein, 177 aa, Gossypium hirsutum
  Clone ID: uC-gsflmaxxa048d10b1.pep
PTRPVGSSSSNFKLYDQFELLEYEDRLVFKSPESPDQGFSICRRQGNIEPLSDESSSGKPSKTSTIYGVAGTIRLLAGTYVLVITSRKEVGSFLGFPVYRVESMKFLACNEALRFSNSQEKRDEAYFMSLLKTVEATPGLYYSYETDITVNLQRRCKLMEAWTSKPLWKQADPSFVW

SEQ ID NO: 112532 - protein, 63 aa, Gossypium hirsutum
  Clone ID: uC-gsflmaxxa048d11b1.pep
SHIFFSFCLKPFPSSQKMKIKKKTLFKFSSCFKTIFMENFIILLFILVFLSFTSLTSRAWFCP

SEQ ID NO: 112533 - protein, 170 aa, Gossypium hirsutum
  Clone ID: uC-gsflmaxxa048e03b1.pep
MTDHQQRIHPVVEVEAPAPTTPLVPHGSATSEKGSPIQQRPPQRTIPVRPPPPPRKRSCCCKCICWTVSLIVVLLIILGATIGILYLVFRPQLPKYSIDSLRISNLRLNFDMTLYAKFDVKITANNPNKKIGIYYEKGGRLSVWYTNSKLCEGSLPKFYQGHQNITKLEV

SEQ ID NO: 112534 - protein, 85 aa, Gossypium hirsutum
  Clone ID: uC-gsflmaxxa048f01b1.pep
RIEDTSPSHGIVAGKSYSMVQQECACHNFNLLKNLKLEKYIHHSLFFGHPIYVSLLQTNYNSIILLRSYPLYGITMKTCFQKKKK

SEQ ID NO: 112535 - protein, 176 aa, Gossypium hirsutum
  Clone ID: uC-gsflmaxxa048f06b1.pep
VTLGKLRHPNIVKILGFCSSGLDRILIYEFIERGSLDQLIYGEDQENPDGRFLCWYTRKKIVLGIANGLAYLHGLDTPIIHRDIKASNVLLDRDFEAHISDFGLARQIEESQTHVSTQVAGTMGYMPPEYREGNTAATVVADVYSFGVLMIEIATQNRPNWPVRFEGKVIGLVEWA

SEQ ID NO: 112536 - protein, 161 aa, Gossypium hirsutum
  unsure (1)..(161): unsure at all Xaa locations
  Clone ID: uC-gsflmaxxa048f09b1.pep
MLTFRPSHLLRYTCCITRPLTPLLPPFSSHILPSNSPFFRPKPLSLSSLNPHSNMSTRPSAFDALMSNARRLAGKKSSSSSSPTKKRKSPDSSPTQNPNPPKTVGSTEVKHDAEVSSDGIGKPINDSPKPDLDEAKKPPDSKKVKVXSASERHAEMKGKIV

SEQ ID NO: 112537 - protein, 64 aa, Gossypium hirsutum
  Clone ID: uC-gsflmaxxa048g01b1.pep
YVLSLEFCWFWSWDGYVLCVPYWVSFGLILTCLMSLFGSTQLETRVVTWSCATHGHLTQPCVFC

SEQ ID NO: 112538 - protein, 135 aa, Gossypium hirsutum
  Clone ID: uC-gsflmaxxa048g11b1.pep
NMVLKKPASSRTDIHLRKKAIVKIHFDEAYDKRNFRSASGVVVWGCRNEKLATKTVLHNYVPSPFAAEAYAGLEAIKLGILMGFRDSQIKGDSKTVIRKCQTTEVDKSVIGAIIRDIQDKCAHYQTIKFKYIPRK

SEQ ID NO: 112539 - protein, 148 aa, Gossypium hirsutum
  unsure (1)..(148): unsure at all Xaa locations
  Clone ID: uC-gsflmaxxa048h02b1.pep
VLMCNLLKNPIPCLAAILQVQEAMYEQQQFXAMPSHFFTGLTSLTTIHLDNYLYEPWEILGSFMVGSSLITLSTNTANIKGKFPGLLDPETVPSFTALYSALNKLEGELPAEFSGSMIQSIWVNGQSLNGTIEGIQNMTSLTDVLSHE

SEQ ID NO: 112540 - protein, 163 aa, Gossypium hirsutum
  Clone ID: uC-gsflmaxxa048h03b1.pep
MAVDGDSPPHYNDDCSTSPFRKSPWSSHESTHLYASAVEDTNNVTPNVLMGSLVREEGHIYSLAASGDLLYTGSHSKNIRVWRNQKEFSGFKSNSGLVKTIVIAGEKIFTGHQDGKIRVWKIANKNSGVHKRVGTLPAFKDYLISSMKPSSYVEVNSNRKAVW

SEQ ID NO: 112541 - protein, 177 aa, Gossypium hirsutum
  Clone ID: uC-gsflmaxxa048h07b1.pep
MSNPGEPLRMSSDYPGTGGASERQQEPDGDADLRVPLQNLSTVKRRMDSLQDFLSQSVNTNTLISKDQMDHVSSEIVNAVHQTIINGAALLSCAQIHYRNLAPVLNLTPETKPEFEDYDGGESEVIELDAVELLSEHLHFCEICGKGFKRDANLRMHMRAHGDQYKTPEALAKKPEV

SEQ ID NO: 112542 - protein, 55 aa, Gossypium hirsutum
  Clone ID: uC-gsflmaxxa049b01b1.pep
LASAIFLSKLLLNRFTFFSFEAFFLPFLISWHFLVWFVQPIISSLIFGILRDLHF

SEQ ID NO: 112543 - protein, 79 aa, Gossypium hirsutum
  Clone ID: uC-gsflmaxxa049b06b1.pep
SNLNNNWFSPHMSDLCKNPPKAYTTKNRARNMKQLSFVHNGFWLNYSTNLTSSIYLKENPLGDPRKRFTEQQIKRRRIT

SEQ ID NO: 112544 - protein, 98 aa, Gossypium hirsutum
  Clone ID: uC-gsflmaxxa049b07b1.pep
SPRLRGHVCMEHSCKSCDCAEVNPRQEQTQFQHHGAQSPTAMVYLSLYIVSRLLPTESVVQHNILLAVSGISTSELAVPTVAMQLTNQSLSITVHWIF

SEQ ID NO: 112545 - protein, 69 aa, Gossypium hirsutum
  unsure (1)..(69): unsure at all Xaa locations
  Clone ID: uC-gsflmaxxa049b08b1.pep
NPMVFYDLTIGGYPCAPIGFDVLGNRAPRTADTFLALFTXRKVSGAAVSSSTTNAAVLHCGIPNFMCPG

SEQ ID NO: 112546 - protein, 73 aa, Gossypium hirsutum
  Clone ID: uC-gsflmaxxa049b12b1.pep
KEQTRNPAYATGSLMRASIPLGIVPIIISNQGTEFVSTMSVTTTIACSAKPTELSNMTPFGSGISNFVAYGRA

SEQ ID NO: 112547 - protein, 55 aa, Gossypium hirsutum
  Clone ID: uC-gsflmaxxa049c04b1.pep
NGNGRRFWVIARVKKGKKHDYPWPDNIDLDIKDGHLTYLCHFKPLAEKPKPVTLP

SEQ ID NO: 112548 - protein, 52 aa, Gossypium hirsutum
  Clone ID: uC-gsflmaxxa049c08b1.pep
MKTTSTVRITWVSLHSGVLHSQHVWMSPTTAYLTQFELLILFYDSAFIPSNL

SEQ ID NO: 112549 - protein, 68 aa, Gossypium hirsutum
  Clone ID: uC-gsflmaxxa049c09b1.pep
SFPSSSRDKSASGHSLTVRETITVTRAEIEGATVYEVTAAGNHRSKMGICLALHWQIWPTSTLLLTKC

SEQ ID NO: 112550 - protein, 54 aa, Gossypium hirsutum
  Clone ID: uC-gsflmaxxa049c10b1.pep
LKESQRCSPSPPPLNNQETTVPVSLSFNKESTVQIQWEYNLNIFKNKLNQWIEP

SEQ ID NO: 112551 - protein, 61 aa, Gossypium hirsutum
  Clone ID: uC-gsflmaxxa049e04b1.pep
KARCYKLIFGLLSTTGRKTCFFGSWILITIFMILAQEMTYSLIKCAEDNVKPLGDRGKVSL

SEQ ID NO: 112552 - protein, 72 aa, Gossypium hirsutum
  Clone ID: uC-gsflmaxxa049e06b1.pep
SETEASGCSSSTQTHLPLAAITYVHVYSTLRALKPFEIIAHHISCAQPHFSFSYSFYPNLILSLLIIHSICT

SEQ ID NO: 112553 - protein, 107 aa, Gossypium hirsutum
  Clone ID: uC-gsflmaxxa049f03b1.pep
FRVGGRVGALRVHSIIKGAVVAFSAYRDFNAFPRRLTEGCQRTGVKLIDVPNGRKDAADKAILVDMFLFALDNPPPLFIMLISGDVDCAPALHILGQRGYTIILAIP

SEQ ID NO: 112554 - protein, 60 aa, Gossypium hirsutum
  Clone ID: uC-gsflmaxxa049f08b1.pep
VCPPVVILRPALTQGPARSVLPQHTGSDIAPPCSALRYNPLPKASAPISPLAMPTLYHSP

SEQ ID NO: 112555 - protein, 99 aa, Gossypium hirsutum
  Clone ID: uC-gsflmaxxa049f10b1.pep
MEGSVEDMAKAVSDLALDSSAAGEAQSKNARKKELKNKQREEERHRKAEEKAAKQAAVMAGTHSQKHASAEDEDMDPTQFHENRLKFLASQKAEGKNPY

SEQ ID NO: 112556 - protein, 64 aa, Gossypium hirsutum
  Clone ID: uC-gsflmaxxa049f11b1.pep
GYDDSSWAIQTKTGRFVGEVQLILLYANALHQASGGYSQPSAPPALCTDTLLTTFIRGTTCFSC

SEQ ID NO: 112557 - protein, 62 aa, Gossypium hirsutum
  Clone ID: uC-gsflmaxxa049g06b1.pep
MDSTVALKLACGVVLCLDVGAPLAVGAIRCGQLILGLTPCIPYVRNIGAGGVPVSCCNGIRS

SEQ ID NO: 112558 - protein, 54 aa, Gossypium hirsutum
  Clone ID: uC-gsflmaxxa049g09b1.pep
ATCFIQSSCNHDLLPILLLKGPKSISRGKISMELSDVSSLGGNLLSSIQSSDYC

SEQ ID NO: 112559 - protein, 57 aa, Gossypium hirsutum
  Clone ID: uC-gsflmaxxa049h09b1.pep
LTTQGHNLGSSTRGRILTMIGLWTFEDSLLSMLHKVLAKWNQNTRRTTGYLRTLQTF

SEQ ID NO: 112560 - protein, 52 aa, Gossypium hirsutum
  Clone ID: uC-gsflmaxxa051f03b1.pep
LTRGRSENKIQRKMLMKCSVMLLNMESMFSILLAAYPIPMKKEISFLTYIYI

SEQ ID NO: 112561 - protein, 35 aa, Gossypium hirsutum
  Clone ID: uC-gsflmaxxa051h03b1.pep
LTRARQSEILPYLTYVLSLRAGLGRIYESIPLATP

SEQ ID NO: 112562 - protein, 101 aa, Gossypium hirsutum
  Clone ID: uC-gsflmaxxa051h09b1.pep
MYLFVGIARIYEHSFSNPELCGPYLGPCKDGVAKGTHETHVKGGLSASLKLLLVIGLLVFSILFAVAAIIKARSLKKASDARARKLTAFQRLEFTCDDVLG

SEQ ID NO: 112563 - protein, 71 aa, Gossypium hirsutum
  unsure (1)..(71): unsure at all Xaa locations
  Clone ID: uC-gsflmaxxa052c08b1.pep
GDHKITNGHIALFLINRFKAAIRETMVLPNCESAYIPWMMAEKDDWIPRNVAPXIWLNHDLFSSSDLKTLS

SEQ ID NO: 112564 - protein, 35 aa, Gossypium hirsutum
  Clone ID: uC-gsflmaxxa052e03b1.pep
NSPSKPTTYQCRHGRIIHLSVSLALQSCDDHLFAS

SEQ ID NO: 112565 - protein, 32 aa, Gossypium hirsutum
  Clone ID: uC-gsflmaxxa052f12b1.pep
SFPAYQPPFKDFHHFRKGNKINVHIDSLRFFC

SEQ ID NO: 112566 - protein, 46 aa, Gossypium hirsutum
  Clone ID: uC-gsflmaxxa052g08b1.pep
LASRAVPISIGAPCERSTCIVVFLLFLEGANILSRAGASLIFKASA

SEQ ID NO: 112567 - protein, 53 aa, Gossypium hirsutum
  Clone ID: uC-gsflmaxxa052h04b1.pep
CLPKVGQFPTCCKTALKHCFILTKHWGKFQVTWVSYLVMLSSSTKGCDSLASL

SEQ ID NO: 112568 - protein, 119 aa, Gossypium hirsutum
  Clone ID: uC-gsflmaxxa052h10b1.pep
KRANNNKFLWASSGSESHLSVTTKSLESQDTESSLLILLIEVKNASLFWFTAFSLWFVAFPFLATAADFLAGDFLHARFRLVLILFQQIKSSKHSLLRQRSLQKADYFKFQLMVVNFVL

SEQ ID NO: 112569 - protein, 65 aa, Gossypium hirsutum
  Clone ID: uC-gsflmaxxa054a06b1.pep
LTMVVELGNGDDGVTSLASPTSAMASVLPVACVSQQSYVYELLFFTLDRLHKESELVLVDAERIQ

SEQ ID NO: 112570 - protein, 44 aa, Gossypium hirsutum
  Clone ID: uC-gsflmaxxa054a10b1.pep
ILREYFNQNPFPNHVSASTQAIPSKFIDELRSTILKIIYPNPYR

SEQ ID NO: 112571 - protein, 123 aa, Gossypium hirsutum
  Clone ID: uC-gsflmaxxa054a12b1.pep
MCLQTERERAVQCSEGEMAFGSTPVLLWLFFLSLSPLTKAKVPAIIVFGDSSVDSGNNNLISTVLKSNFQPYGRDFYGGQPTGRFCNGRIPPDFIFEAFGLKPGIPAYLDPAYNISDFATGVW

SEQ ID NO: 112572 - protein, 69 aa, Gossypium hirsutum
  Clone ID: uC-gsflmaxxa054b01b1.pep
TSVGTEFLLSKPRNFYLFNHKQSFSSTNARFPCMMVLQRPNYPHLQRYLSTSCKTVFLQNFLRFPPCCL

SEQ ID NO: 112573 - protein, 30 aa, Gossypium hirsutum
  Clone ID: uC-gsflmaxxa054b06b1.pep
MGRVLVIEGSRIHYRSIKFVINHLCPVGAI

SEQ ID NO: 112574 - protein, 48 aa, Gossypium hirsutum
  Clone ID: uC-gsflmaxxa054b07b1.pep
VRIILSLQNHHALKTIIFLSQPILIIKTYKIFLLLDNKNSFPTLSSIL

SEQ ID NO: 112575 - protein, 125 aa, Gossypium hirsutum
  Clone ID: uC-gsflmaxxa054b09b1.pep
MVEAQTWTTRRMSNPRLESTATADHQLLDIPATPTAEVRNGIYSVGSHLSPNLLTALIIASWFMSNIGVLLLNKYLLSFYGYRYPIFLTMLHMNSCACYSYVAINFLEIVPRQHILSRKQFFKIF

SEQ ID NO: 112576 - protein, 127 aa, Gossypium hirsutum
  unsure (1)..(127): unsure at all Xaa locations
  Clone ID: uC-gsflmaxxa054b12b1.pep
FLGAFGEVRLGQDKKSGGVFNTKKFKKSEMLIRGQVEHVRAERNLLAEVASHFIVKLYYSFQDAEYLYLIMEYLPGGDMMTLLMREDTLTDTVARFYIAXSVLAIESIHRHNYIPRDIKPDNLLLDK

SEQ ID NO: 112577 - protein, 47 aa, Gossypium hirsutum
  Clone ID: uC-gsflmaxxa054c01b1.pep
IVVCSIRDVWVRRCYLVRNYDVSLKLVFYRRRFLNTARQFLQVSQHK

SEQ ID NO: 112578 - protein, 110 aa, Gossypium hirsutum
  unsure (1)..(110): unsure at all Xaa locations
  Clone ID: uC-gsflmaxxa054c03b1.pep
YVLKRNGKKKKSQNNESNXVAICPHISLNSAQNTISIHLTSKFSPSCFYTFQQMHSRTLTNVYNSLCKPSSIIVLNSFYRFVNQACSISELYMYSEHFYTTTSSMNENRV

SEQ ID NO: 112579 - protein, 61 aa, Gossypium hirsutum
  Clone ID: uC-gsflmaxxa054c08b1.pep
EWSLNLKLPKNFYRQEVWDLIMRDYCIGSILSVFGVGNAGVKTASFLTSPPVARIGIERKN

SEQ ID NO: 112580 - protein, 123 aa, Gossypium hirsutum
  Clone ID: uC-gsflmaxxa054c10b1.pep
MAMAMAKPWMYCLLVCLGMALNNVASGQGENPFEPDGGRRREMVPAMFIFGDSLIDNGNNNDLPSFAKANYFPYGIDFNGGPTGRFSNGYTMVDEIAELLGLPLISAYSEAFGGQSFHGVNYP

SEQ ID NO: 112581 - protein, 51 aa, Gossypium hirsutum
  Clone ID: uC-gsflmaxxa054d05b1.pep
VIFSFTFQTSISGEYSALMTVTAILVPVVVLKVLILLMQFYVEYYGCLPEW

SEQ ID NO: 112582 - protein, 169 aa, Gossypium hirsutum
  Clone ID: uC-gsflmaxxa054e02b1.pep
VGVEFAREYTKLEVKFVPEISEFSETKSDEDLAKEVAQFASLVQDSVGVLTETSNLFESMSRYPFSACSGLVFVPKITAKNTAKLFDLMVEDIRSFINGRGRMSPEINFHLLGIGDPCETRFVLGKIILETMKAGPRGDATEIGNDEKDLQPKATDEILSNNEIPGNEV

SEQ ID NO: 112583 - protein, 59 aa, Gossypium hirsutum
  Clone ID: uC-gsflmaxxa054f03b1.pep
MGTRGVIGDKWSMRILWGCAIGSAVALYMVAVERQKQNRDQMMAESLKAMESEGSGERV

SEQ ID NO: 112584 - protein, 116 aa, Gossypium hirsutum
  Clone ID: uC-gsflmaxxa054g12b1.pep
MDRSRLNMRGRCSGSTPSEESALDFERTCCCHPHLPSFSSPTLQPFASAGQHSDNNAPYFSWPTSSRLNDAAEERANYFANLQKGVLPETLGGVAKGQQATTLLELMTLKAFHSKN

SEQ ID NO: 112585 - protein, 109 aa, Gossypium hirsutum
  unsure (1)..(109): unsure at all Xaa locations
  Clone ID: uC-gsflmaxxa054h04b1.pep
FISSTILFGQRGGKVENMWRIKKEFDYKSLSRKLEMHLDKLIAQNELQQKVFDDEVERINLEALNRVSEVERNFAGALXKERLKCQMEYMESVKKLEEKMIENHTKAWV

SEQ ID NO: 112586 - protein, 49 aa, Gossypium hirsutum
  Clone ID: uC-gsflmaxxa054h07b1.pep
KWRILQKPFMGTLPFSSKSSKNPLSPQVFSHGNGDSLTEVSFKAMCKTT

SEQ ID NO: 112587 - protein, 73 aa, Gossypium hirsutum
  unsure (1)..(73): unsure at all Xaa locations
  Clone ID: uC-gsflmaxxa054h11b1.pep
YFFAHPVPSHVGGFNDXTGTLSNDSRNGAWKTDVRGVEGERATCCDICAEAICCCGTEAKGLGFFDSVMGLLG

SEQ ID NO: 112588 - protein, 37 aa, Gossypium hirsutum
  Clone ID: uC-gsflmaxxa055a01b1.pep
RFYTRLLPARRIISLGHRQEGAIRLTGRASFLLPSPS

SEQ ID NO: 112589 - protein, 143 aa, Gossypium hirsutum
  unsure (1)..(143): unsure at all Xaa locations
  Clone ID: uC-gsflmaxxa055c04b1.pep
LDFDIGEEEDEEGTPSPSSISPPLQYFDRDRHVAFLEMMYNLMPHHYQSQEINRLTLAFFTISGLHLLRALDRVDKDRVADWVXLSFQAHPRSRAELKIGQFYGFHGSRTSQFPPDENGVSARNAGHLASTYCALAILKTVGL

SEQ ID NO: 112590 - protein, 141 aa, Gossypium hirsutum
  unsure (1)..(141): unsure at all Xaa locations
  Clone ID: uC-gsflmaxxa055c10b1.pep
QCCTFRPMATKPELQSSDWSSAAAAAPQPETTPSAPKKPDGGARIHFTNPDDAIEAFVDGCPEKMPKGMTVLQACEIAGVDIPGLGGHSRLSIAGNCRMCLVEVEKSPKPVASCAMPALPGMKIKTDTPLAKKARXGVMEF

SEQ ID NO: 112591 - protein, 64 aa, Gossypium hirsutum
  Clone ID: uC-gsflmaxxa055d11b1.pep
DTFKETKKDRPHKLPNPKATLIVINLPPYPQSRFIKKSPLKSPTSTTFKAIDNISLSNPKNQSI

SEQ ID NO: 112592 - protein, 115 aa, Gossypium hirsutum
  Clone ID: uC-gsflmaxxa055e04b1.pep
FVAAALILLAGQVTARREIIEVKGRGVTDPILEAKLIDMLEETERTKDKVPVLGNSEMVKYCDNAYGMSIGNLKKALGMLQRGIKSPQGFKELEAIVLVVMKAYEECDHVFAENA

SEQ ID NO: 112593 - protein, 111 aa, Gossypium hirsutum
  Clone ID: uC-gsflmaxxa055f03b1.pep
LWCWCCSVDGFSCAISPQLLLPATSSAFKKLCHLCNVSRLKHVWSETTFKLMTTGNFRCANDADCPSCSSYLFFNAKNQEKGLELRVIVDHSRYILTGEIHLTQGNCPTPL

SEQ ID NO: 112594 - protein, 159 aa, Gossypium hirsutum
  Clone ID: uC-gsflmaxxa055g06b1.pep
ALTTSLCWKIVAKTVDSTGVGLVIYQKPSSYSCYKHRKEKLPPLCEQKTNQNASWYEPLSYCISRLPVDRMGNLLRWSTPWPQRLSSKPPSLPSEPDAEDIFIEDTKHCAALVSEVYLDGLAISLGRIRNVMDMNAGFGGVAAALIDQPLWVMNVDPLM

SEQ ID NO: 112595 - protein, 107 aa, Gossypium hirsutum
  unsure (1)..(107): unsure at all Xaa locations
  Clone ID: uC-gsflmaxxa055g07b1.pep
GTDLIYVVGFAASYQFEMYQINAKNGELLKHESASFSSGFSGEVSLVSTETVVALDSTGSILLTISFQDGKISSQQTPIXSNLVEDSLGPXVLIPSSALGIFAIRQM

SEQ ID NO: 112596 - protein, 38 aa, Gossypium hirsutum
  Clone ID: uC-gsflmaxxa055h09b1.pep
TQPLSSYPPNIRSSDRQDTAESSAESEFPTLRTSSRSR

SEQ ID NO: 112597 - protein, 113 aa, Gossypium hirsutum
  Clone ID: uC-gsflmaxxa057a03b1.pep
ILSEVTMGNCLQYFWPTAQNNPDTSGLTTGLLSEITSESDFPTVNLKVFTYAELDKATRNFALANRLGDGGSSHVFMGYIDERTCRAASLATGTPRAVKRVRTGSNLTHDELL

SEQ ID NO: 112598 - protein, 54 aa, Gossypium hirsutum
  unsure (1)..(54): unsure at all Xaa locations
  Clone ID: uC-gsflmaxxa057a05b1.pep
GFLRNNMSDHIFCFRDKMKLNLLESVFYALNVSNDCSNGQXICFCTLTFSNNKF

SEQ ID NO: 112599 - protein, 119 aa, Gossypium hirsutum
  Clone ID: uC-gsflmaxxa057a07b1.pep
PPFPQMGCCLSSKKGSSRGKEAHLHAGLESFNQKPSLESRAPPPSAEEETVKEVLSETPKPKARIFIPQEEEKKKPQIEKPAFVKIQGEESLNFNIKPEPKLPVNGIEESALEDVSEIC

SEQ ID NO: 112600 - protein, 70 aa, Gossypium hirsutum
  Clone ID: uC-gsflmaxxa057a11b1.pep
DKMKSISISPRPIFPLILPQLEHRYKISRLNHRLPLLHLDGAGRSLLLMASLSNHNHNHNHNHNHHFRHA

SEQ ID NO: 112601 - protein, 141 aa, Gossypium hirsutum
  Clone ID: uC-gsflmaxxa057b03b1.pep
MAYLSEPSSSLSFSSSSHLSNGSITHNIPPFSVPETGANLEALSLTKLSSSLEQLIVENCPVFSDADIVVEGVAVGVHRCILAVRSKFFNEVFKDGSGSSEKDGKPSYNMSELLPYGKIALEAFQVFLSYLYTGKLKPSPM

SEQ ID NO: 112602 - protein, 177 aa, Gossypium hirsutum
  unsure (1)..(177): unsure at all Xaa locations
  Clone ID: uC-gsflmaxxa057b07b1.pep
SGFNKNTMLMRYVRSSLIASRFFSTAASVEKAVPTNEVAPKSSGGGRRNTLGRRLIGLVYPKHTAVATIQKWKEEGRTVRKYELNRVVRELRKLKRYKHALEICEWMRLQKDIKLLPGDYAIHLDLIAKIRGLDSAEKFFKDLPDKMRDQATYTALLHTYVQNKLSGKAEALMKXMS

SEQ ID NO: 112603 - protein, 75 aa, Gossypium hirsutum
  Clone ID: uC-gsflmaxxa057b09b1.pep
KFSSPSSQPICHRRRRLDHLVHHPRLTSLLRRRRCRRRSPLLKNNFCLPARYSLFFSSVFKALCILIGWATLVSQ

SEQ ID NO: 112604 - protein, 121 aa, Gossypium hirsutum
  Clone ID: uC-gsflmaxxa057c08b1.pep
KREANTKMTVVIMISMLYISSVTPILGCERCGKAPHMRSKPKGQASNGTITMTPIVKPPIKLPPVDASIAKRPIDLHPVTGRTINLTSGTDTPGTNPPSGRLCLTPPTKDTCPIDTLKVVA

SEQ ID NO: 112605 - protein, 130 aa, Gossypium hirsutum
  unsure (1)..(130): unsure at all Xaa locations
  Clone ID: uC-gsflmaxxa057c11b1.pep
MASENFVQLAIPCFDSHYDHXSMLIENFLRSKXYWQVVSNGVPKSTLTMSNTKIEGMKLKDLKAKNYLFQAIECLILETILCKNTFKHIWDHMKKKYQGSSRIKRQXFQALRFEFETLRMKTRESISNFF

SEQ ID NO: 112606 - protein, 163 aa, Gossypium hirsutum
  Clone ID: uC-gsflmaxxa057d10b1.pep
HASAHASAFLFFFCFFFWVSFIYSTGVVEASIDAMSTKIDLSLSRPNRIYRPSEPLEGKILVKSASSISHYGIRMAINGSVNLQVRGGSAGVIESFYGVVKPITILSRTLEIRPSGKIVSGTTEIPFSITLRNPKEDNSERVYETFHGTNISIQVLATVDIMR

SEQ ID NO: 112607 - protein, 169 aa, Gossypium hirsutum
  unsure (1)..(169): unsure at all Xaa locations
  Clone ID: uC-gsflmaxxa057e12b1.pep
AYASAHASAHAGVPFGSNVTVNGNGNVGGGGSPVSKIFSALPVRKTAADNFLNSENEKSDYDWLLTPPGTPLFPSLEMESQKTLMSQIGMSNARPVSLKTRLANLPEEPALKSTLALKQQAPSAGVIFSSTLNRRPSSSGGSKSASRPXTPTGRPTLPRQPSLKVFYST

SEQ ID NO: 112608 - protein, 111 aa, Gossypium hirsutum
  Clone ID: uC-gsflmaxxa057g08b1.pep
DLSYKDTNKFKSPDLCSHSQTKKHKPSKGYIIIMHLGFCFSSSQSWLSLPLCTVPTVFKKEALGIYRYFWFRRIYVCFIYLWATVEDVGKFFFLLVFKGIGEGRGDSFCFQ

SEQ ID NO: 112609 - protein, 58 aa, Gossypium hirsutum
  Clone ID: uC-gsflmaxxa057g11b1.pep
LGKRGNKHEADELAEKMLEMASDGRVENKISRKPKKLIHRKETKYGGDDWQTIVHRYG

SEQ ID NO: 112610 - protein, 156 aa, Gossypium hirsutum
  unsure (1)..(156): unsure at all Xaa locations
  Clone ID: uC-gsflmaxxa057h10b1.pep
WQKEKFEREWEELDGKKLKIEKELKNVNLQQEKFDKEKLAEDERLKNEKQVAEDCIKRELEALEVAKETFAATMEHERSVVAEKAESERSQRLHDLELLKSQLESDMQDIFEEMEKELRERKKPFEEEKERELYNINYLRXVALREMEELKQERLK

SEQ ID NO: 112611 - protein, 56 aa, Gossypium hirsutum
  Clone ID: uC-gsflmaxxa057h11b1.pep
KNGGKRPGESVKDFQELICGFFQTVPPWIMTSSVTNQGRDEILLHMAQLRNYWLKH

SEQ ID NO: 112612 - protein, 48 aa, Gossypium hirsutum
  Clone ID: uC-gsflmaxxa058c07b1.pep
HFLLFISNPFNLWYTKDVKVCSNTLTRLVVVCSICREVCVRGKRWGFY

SEQ ID NO: 112613 - protein, 152 aa, Gossypium hirsutum
  unsure (1)..(152): unsure at all Xaa locations
  Clone ID: uC-gsflmaxxa058c08b1.pep
MENQNPLQNGALEGAAGNGGRSGDGSALIFLGTGCSSAVPNAMCLIQPSDPPCQVCSQSLSIPPDRNPNYRCNTSLLIDYCSSDGIRNYIIIDVGKTFREQVLRWFTFHKIPRVDSIVLTHEHADAILGLDEFRAIQPYSPTNDIDPTXIYL

SEQ ID NO: 112614 - protein, 165 aa, Gossypium hirsutum
  Clone ID: uC-gsflmaxxa058d05b1.pep
LNAFCEKHSVEQRAKAETQKHGVEELKNMKQIRVKLERLRLLCDRIIKREKLKRELVVCSHEILARKRDHVTRSLLFHSPFHPDVSLESATTSLKGHTDGYRSCSESMRSDDITVDSTLSVKHQIKIPVSVENDQRTDDSSTSQSPFVPKPMDRVRFSGSRSLRD

SEQ ID NO: 112615 - protein, 84 aa, Gossypium hirsutum
  Clone ID: uC-gsflmaxxa058d12b1.pep
LFCHTSTASSTSNISRWSTSISSTSLSGTLKFFFFNTFWEILNIMFSGTTFETSLANRPTLPEMLFTTVLTLESIRSHITYIRH

SEQ ID NO: 112616 - protein, 126 aa, Gossypium hirsutum
  Clone ID: uC-gsflmaxxa058e02b1.pep
MGIRESHTFSAWKWLGFVSAVWVQTISGNNYTFSNYSDAIKTLMNLTQLQLNNLSVAKDVGKAFGLLAGLASDRLPTPVILLIGAIEGLIGYGAQWLVVSQKIQPLPYWQMCIFMCLGGNSTTWMN

SEQ ID NO: 112617 - protein, 60 aa, Gossypium hirsutum
  Clone ID: uC-gsflmaxxa058e05b1.pep
RIPKKKAPSSLRVVFTVIVSHVISVHKKEILSISNSNIKEHFLKIASMVLHRLLLSIKYE

SEQ ID NO: 112618 - protein, 166 aa, Gossypium hirsutum
  Clone ID: uC-gsflmaxxa058e07b1.pep
WFQAFIGESELARTEVVKRLWTYIREKNLQDPKDKRNVLCDDSLYALFRVKSINMFQMNKALSKHIWPLNEEEVTVQADSAKTERKSKQARERVADEPKQKEKKQKKGASGFLAPLPLSDALVKFFATGENALSRADVVKKMWEYIKQNDLQDPSDKRRILCDDKL

SEQ ID NO: 112619 - protein, 102 aa, Gossypium hirsutum
  Clone ID: uC-gsflmaxxa058f12b1.pep
MAMATATMMMSRMMNMPPSSSSSTPSSSSSPLATQSLSTPSSPSSSRQASSLPLRTIPGSYGWPLVGPISDRLDYFWFQGPDTFFRSRMEKHKSTVFRTNVP

SEQ ID NO: 112620 - protein, 72 aa, Gossypium hirsutum
  Clone ID: uC-gsflmaxxa058h01b1.pep
FLKNSRIIFLSGCFICSVTFPRFYKILRFLFIYQKSSTEKKDRILFFFFFFSRETEISFRSFFLHVFYFFFC

SEQ ID NO: 112621 - protein, 132 aa, Gossypium hirsutum
  Clone ID: uC-gsflmaxxa058h08b1.pep
SLSSGRNDINRLEEIRLAEELLSQLQNQCIPDKAITSSMKEFGLERAKMNGWPNTYVFTKAMGEMLLGKFKGDLPLVIIRPTIIASTYKQPFPGWIEGVRTMDVVLVNYGKGKLTCFPGNLNSALDVIPVDM

SEQ ID NO: 112622 - protein, 71 aa, Gossypium hirsutum
  Clone ID: uC-gsflmaxxa058h09b1.pep
RPLSTRAGLSTKACKNGLKESKEKNKQNIYIIYFIFSFRPIKGHLICKIRTEKYGKYREKSIEERVAYLFF

SEQ ID NO: 112623 - protein, 139 aa, Gossypium hirsutum
  unsure (1)..(139): unsure at all Xaa locations
  Clone ID: uC-gsflmaxxa060a06b1.pep
FTLPNCFKRTIADEGMMSLWRGNAANVIRYFPTQALNFAFKDYFKKLFNFKKDRDGYWKWFAGNLASGGAAGASSLLFVYSLDYARTRLANDAKAAKTGGERQFNGLVDVYTKTLKLDGIAGLYRGFNISXCVGIIVYR

SEQ ID NO: 112624 - protein, 63 aa, Gossypium hirsutum
  Clone ID: uC-gsflmaxxa060b11b1.pep
LLNLHYLDSVKYRVVENMATRPVTASRSQNFDEVGVMFRRVKNSAKYYWWCVRLMGRLDRTRE

SEQ ID NO: 112625 - protein, 82 aa, Gossypium hirsutum
  Clone ID: uC-gsflmaxxa060c01b1.pep
LFLIFLVHLTVFRAFFSFFEGFFLFFFTLFASSPFLFQLLFSTIILRVSNFSFLIFFFLLCLFLFQWPLMMLKHLLRFLSHR

SEQ ID NO: 112626 - protein, 57 aa, Gossypium hirsutum
  Clone ID: uC-gsflmaxxa060e08b1.pep
LVRTLYHGGEHRVCNNCPGTQAELHSRVPYEVDLSTGIDSLNVCDRLFTPFLEKKKV

SEQ ID NO: 112627 - protein, 110 aa, Gossypium hirsutum
  Clone ID: uC-gsflmaxxa060f09b1.pep
MSKKRKSDATRLDEVSRSMYTAFCSAANSLSQLYSHSMNHQSLSFQAGERYALEKLFEWILRQQEEGLKVMTTDIVAYLQNELEYGAEDFPMSPRQPFQQQQHPRSATHQ

SEQ ID NO: 112628 - protein, 97 aa, Gossypium hirsutum
  Clone ID: uC-gsflmaxxa060g06b1.pep
KVQICHSQLPLLSNKVSISLKMHTLIYVQGISTMVYCGLRHKYHYSELISLPPINRSFILSQSMIKSIAASFCKHNLLAMRFLTNSPKPSNPASNFI

SEQ ID NO: 112629 - protein, 107 aa, Gossypium hirsutum
  unsure (1)..(107): unsure at all Xaa locations
  Clone ID: uC-gsflmaxxa060h05b1.pep
MDGKGEGPAVGIDLXTTKSCDGVGHHDRVEIIYNDQGDRTTPPNVGXTDTERLIGEASNNQGAMNTINTVVDAKRMIGRRNTDFSPQSDIKLRPLKDITGPVDKPMI

SEQ ID NO: 112630 - protein, 78 aa, Gossypium hirsutum
  unsure (1)..(78): unsure at all Xaa locations
  Clone ID: uC-gsflmaxxa060h07b1.pep
MRLLKVATCNLNQWAMDFDCNLKHIKDSITRAKEVGAVIRLGPELEITGYGCEDHFLELDTVNHAWEXCLEEILLGDW

SEQ ID NO: 112631 - protein, 119 aa, Gossypium hirsutum
  Clone ID: uC-gsflmaxxa060h09b1.pep
KKNKTMNESDYTYSSIPNDVALKIASSLEVTDLSCLSCCSRVWRDLWGSDCLWEPLFKQRWPLLYEDVLKDPDFKGWRGFYIKQHKEMKDQADSVVKFVEKCLQSESIQVNDYLEAIDA

SEQ ID NO: 112632 - protein, 50 aa, Gossypium hirsutum
  Clone ID: uC-gsflmaxxa061a03b1.pep
TGPETGWSSSRHGSYPVRVKALMEESFRQYEATAHREVMVVPTTTVHSAS

SEQ ID NO: 112633 - protein, 167 aa, Gossypium hirsutum
  unsure (1)..(167): unsure at all Xaa locations
  Clone ID: uC-gsflmaxxa061b01b1.pep
QQYDRFLESYHSLEKXNTKGQPDSVVALAKWRILNRLHDRNETLYYRVLMDNIKDFAPIIYTPTVGLVCQNYSGLFRRPRGMYFSAKDKGEMMSMIYNWPAQHVDMIVLTDGSRILGLGDLGAQGIGIPIGKLDMYVAAAGINPQRVLPVMLDVGTNNHKLLEDRLY

SEQ ID NO: 112634 - protein, 119 aa, Gossypium hirsutum
  Clone ID: uC-gsflmaxxa061b08b1.pep
MTIHSDVIQKLLTTNAHIGRQVTTHHFKQFTYGFRNIQCIIDCVKTLICLRNALNFLSCLSRDPCCSFLFINTNPLFQPIIDEMTSRVTSLSPERASSLWKMRGFMTNSCRPKKIRSMH

SEQ ID NO: 112635 - protein, 65 aa, Gossypium hirsutum
  Clone ID: uC-gsflmaxxa061b11b1.pep
SMLMNHGTDTSLFSEWTIKYSSISSMCETLRELNTYRHVSKDTFNITNNLDMDVTEPNKRKDPFL

SEQ ID NO: 112636 - protein, 114 aa, Gossypium hirsutum
  Clone ID: uC-gsflmaxxa061c03b1.pep
RNFGRIRVLREGEREYCGICITNIRFIAGDVKFASKNDIFQWVKHWFKVGTLVVFYWLLLQSFTICFGGRRELPAHKMKMITTTTQRSSINSSAEKNLLLCMHSPLSTTTIIKV

SEQ ID NO: 112637 - protein, 170 aa, Gossypium hirsutum
  Clone ID: uC-gsflmaxxa061c06b1.pep
MQSSKAIEPILFKTHLSTMLKILHKRIKGLFPRLRWPVRCRSNSKIVIKVYTKPHDDTVNGGSQIHQNGESGVLNSASARPIRIANFNAAMFSMAPAMPKPDKSSSFDYDNEGFTKSTNDHRPKGILKQSPLHPNSMNENDSLTKQQIFVKSKLRVPINLPDNEICVLRN

SEQ ID NO: 112638 - protein, 76 aa, Gossypium hirsutum
  Clone ID: uC-gsflmaxxa061c07b1.pep
SFLSKTMENPDKRGGVVLRWGCLQCFLLPHKSLPPFPPSASILRLPSVYILYHTSELLQYFLFLLPRTSCACNPLI

SEQ ID NO: 112639 - protein, 113 aa, Gossypium hirsutum
  unsure (1)..(113): unsure at all Xaa locations
  Clone ID: uC-gsflmaxxa061e08b1.pep
MIFLQNVWWCLQVSDYWRLDDLDSPVSMASGTGGMNKGGFNVQGYKYSGPGKKNASKKSFNIGMMKGPEGLLTLSRNLRSEVTRVVFPDDLKVSDKMICDXXDKSILLWNRFF

SEQ ID NO: 112640 - protein, 82 aa, Gossypium hirsutum
  Clone ID: uC-gsflmaxxa061e09b1.pep
FQVFRSPVIVKGGGVGFNQSKSSSKIKKKSKKGALRRENSTGKIKESSLGRPGKSLQRKFVQFIETEMGFLRHFLRLETLTP

SEQ ID NO: 112641 - protein, 54 aa, Gossypium hirsutum
  Clone ID: uC-gsflmaxxa061e10b1.pep
VVHVMLGVYDLVRETAARSYYICTWCERLTTEADDCPSQYIMQTELVDIIDKSG

SEQ ID NO: 112642 - protein, 168 aa, Gossypium hirsutum
  unsure (1)..(168): unsure at all Xaa locations
  Clone ID: uC-gsflmaxxa061e12b1.pep
TGRILSERSKRKKKTTKDLMIISTQESRKSEDLQEFPSAFTIPLTFISIPSRTESTERLKLSRNKESQNTQSLDLNGMALSFPPFLKSTLLCLTLLSSILFFFFLQAPRKPPRIPQRSLLSTSCYSRHSSDSTLINYLSLITVFSMKKFSSLFPFFSFFSXYFTFYQT

SEQ ID NO: 112643 - protein, 82 aa, Gossypium hirsutum
  unsure (1)..(82): unsure at all Xaa locations
  Clone ID: uC-gsflmaxxa061f01b1.pep
MHIRSINRANIVLVTTVQSPSRITQFRSIRLCYVIYKLIEKVIARRLIGVMHKCIDXAQSAYVPRSLISYNVLLAYEIQHTV

SEQ ID NO: 112644 - protein, 103 aa, Gossypium hirsutum
  unsure (1)..(103): unsure at all Xaa locations
  Clone ID: uC-gsflmaxxa061f05b1.pep
MACIKGVNRSSSVALAPDAPYMAAGTMAGAVDLCFSSSANLEIFKFDFQSDDLELPVIGECPSSERFNRLSCGMNGSSSDEFSLXLIAGGLIDGSIDLWNSLK

SEQ ID NO: 112645 - protein, 110 aa, Gossypium hirsutum
  Clone ID: uC-gsflmaxxa061g01b1.pep
TLMAHGDKDLKLDIENEPITGEEEEYQNRNPILGLKNMAELLLAKARGSFTQGSSDDGVSLSSDASNSGSVYAKNMQAMTSMNVVGHDHNIKDDGKENKLVKEKCKSLSN

SEQ ID NO: 112646 - protein, 76 aa, Gossypium hirsutum
  Clone ID: uC-gsflmaxxa061g08b1.pep
APSHLSALVLPSQYKSQTHFILCFLLLPFSCNHFSQMSCVLHGSNIFMDYISLCNSLLEHEFSIASLLFSCSNARL

SEQ ID NO: 112647 - protein, 122 aa, Gossypium hirsutum
  Clone ID: uC-gsflmaxxa061g09b1.pep
HLNFSYIRVECNMSDQVLNYLIDFISGLALPSFILIIASWRVARLRNLATENYQDRVNRSVANTIKEQLSEKVITPLFTENDVVLPPGMRSYDAINTLVPGDDVELLASIYNNLEQLGGRVG

SEQ ID NO: 112648 - protein, 44 aa, Gossypium hirsutum
  Clone ID: uC-gsflmaxxa061g10b1.pep
SCKLCKANVPFNTAANLSFSYLKRLNIHQLNIMSINYNFNMFNN

SEQ ID NO: 112649 - protein, 176 aa, Gossypium hirsutum
  Clone ID: uC-gsflmaxxa061g12b1.pep
IQSVASEVTADDCDGKSIDWWRGGKLSTHVFQKAILPASMVRKAAQQGGVRKISGINYVDDFEIPKRSRQLIWRAAVKRSKNAAQLALQVRYLDLHVRWNDLVRPEHNISDGKGSETEAYVFRNAIICDKKTVESKIQYGVAFGNQKHLPSRVMKNVVDIEKIDDEKEKYWFHVTY

SEQ ID NO: 112650 - protein, 74 aa, Gossypium hirsutum
  unsure (1)..(74): unsure at all Xaa locations
  Clone ID: uC-gsflmaxxa061h01b1.pep
MQKDNSAPSTPTSARARHRRRSNEFPADESKTNGHLLLVNDHNKYRSMWIRAFSSLWMLGFFLLVIYLGHXYVL

SEQ ID NO: 112651 - protein, 33 aa, Gossypium hirsutum
  Clone ID: uC-gsflmaxxa061h02b1.pep
FTLKGPKVSLVFGMFKDSNNRHQVARNFLNLLT

SEQ ID NO: 112652 - protein, 143 aa, Gossypium hirsutum
  Clone ID: uC-gsflmaxxa061h07b1.pep
PLVRPRVRFSVYKNRFSGQFPANFGRFSPLISIDISENQFSGGFPRFLCERGKLKLLLALENNFSGEFPDSYVECKSLVRLRVNKNHLSGNIPDGFWALPHANMIDFSDNDFTGGVSASIGSSIGLNQLVLQNNKFSSSLPSE

SEQ ID NO: 112653 - protein, 90 aa, Gossypium hirsutum
  Clone ID: uC-gsflmaxxa061h08b1.pep
RLASQGKLLFHFILLYTRICAQKLGRKEQIQKEKMNEALENHLSFLFLLYSICQYCICICVLPVVRLCCVKNSPRLLHGLYSRKERKIKK

SEQ ID NO: 112654 - protein, 185 aa, Gossypium hirsutum
  Clone ID: uC-gsflmaxxa061h12b1.pep
MEEEICEEPKTSEIMIVECVETATNMPYIFSAHESVKQDPCLLTVDTSDGYCLAILKSSTPCVSPIVNQTTKSLRTSSMYSASQKDLRDDKPETMRVTPTEHLAASLHRGLEIIDSHRQSLALRRSSFRFSLKPADSKPILAARKVDVGVHTFPQEEDPAAFLCSNCSQRTYLECKDDTEDSNLQ

SEQ ID NO: 112655 - protein, 80 aa, Gossypium hirsutum
  Clone ID: uC-gsflmaxxa064d11b1.pep
ILSCILGITSSLAFLLRVHLIQKFTLMSYRHIHVPTRNIVTYFVIFDILFGLTVKHLEYYRIHRAQTTAVTTRRALERLA

SEQ ID NO: 112656 - protein, 77 aa, Gossypium hirsutum
  Clone ID: uC-gsflmaxxa064e08b1.pep
MPGGELSTDGTEPFMASKVKAFSTPSPIVEISRKDEPIMEKKEKDPRKIARKYQLELCKKAMEENINVYLETGCGKT

SEQ ID NO: 112657 - protein, 90 aa, Gossypium hirsutum
  Clone ID: uC-gsflmaxxa067a03b1.pep
MEETSGYTAIAVDKDRNSQLAAKWAVDHLLKPGSKCFFVHVLKSLHPQEFEAIPMEGRSSSEAEMQLYFLSCRGYCSRKGIESHEMVLHG

SEQ ID NO: 112658 - protein, 109 aa, Gossypium hirsutum
  unsure (1)..(109): unsure at all Xaa locations
  Clone ID: uC-gsflmaxxa067a09b1.pep
MAVEEGQVYGCHTIESWYEQLLVGSVSXILGVADLTAXWCGPCRYIAPLLAELDKKIPYVTFLKVDADELKEVATVWALEAIPTFMVLREGKIVDKVDXAKKEELHQTV

SEQ ID NO: 112659 - protein, 163 aa, Gossypium hirsutum
  Clone ID: uC-gsflmaxxa067b02b1.pep
PIRSKVVHGGGGDFDTITKAIESVPTGNTKRVIISIGPGVYREKIKIERTKPFITLIGDPKSMANLTFDGTAKQYGTVDSATLIVESDFFVAANLFIVNIAPKPDGEMEGAQGVSLRVSGDKAAFYNCKIIGFQNTLCDDKGNHFFMNCYIRGTVDFIFGNGK

SEQ ID NO: 112660 - protein, 128 aa, Gossypium hirsutum
  Clone ID: uC-gsflmaxxa067b03b1.pep
MVVAMVAASMASGLRIKAMAELCCYLTVVLCAFLVPCLAKLTTIEHPVKPNRSLSFLVVGDWGRKGFYNQSEVAFQMGRIGEKLKIDFGISTGDNFYDNGLTSVYDPSFRDSVTNIYTAKSLHKPWYS

SEQ ID NO: 112661 - protein, 51 aa, Gossypium hirsutum
  Clone ID: uC-gsflmaxxa067b06b1.pep
INSKSLKSLKSQVLQVIGDFDLKEFIMFNRLFRKPKQDTNALTTLEKLIEV

SEQ ID NO: 112662 - protein, 90 aa, Gossypium hirsutum
  Clone ID: uC-gsflmaxxa067b07b1.pep
MRRRGLDFRRPVRKRFPNVVWWTVCGILVLVLIVVLSREGQIESKPTISRKPYRRDRIMEGVTVTDEMLSSNSVTRQLTDQISLAKAFVV

SEQ ID NO: 112663 - protein, 61 aa, Gossypium hirsutum
  Clone ID: uC-gsflmaxxa067b08b1.pep
LTFIDLDQTPTFHEYTDFRASANNSYVSIVHVRLASHTTDTNVRIITSVLHNHLYVARVQQ

SEQ ID NO: 112664 - protein, 145 aa, Gossypium hirsutum
  Clone ID: uC-gsflmaxxa067d09b1.pep
FLADDRYGTVVSEIIKSKAKLYDALNKAKDSSFDATLAGANRLNHNNTEVENNAVTNHVPNTTHPSSGAKHLRHEFKISKSGEGTDCIDLPIAFVPAVIGQGSDAGESSLKKQRKKKKRAKLNTTSQSVVAGSPFNQTTPCSLAL

SEQ ID NO: 112665 - protein, 165 aa, Gossypium hirsutum
  Clone ID: uC-gsflmaxxa067e01b1.pep
FVSCTGALQTSMAQHMSKEEEQVFPLLIEKFTFEEQASLVWQFLCSIPVNMMAEFLPWLYSSISPDEHRDMRKCLSKINSREKLLYQVIFTWMAGVKTAEKCKNGKGEARCEAFGASVLPSQTESGYCACESSKSCERKYMELSSRPKDSTLSSPIDEIMLWHNA

SEQ ID NO: 112666 - protein, 75 aa, Gossypium hirsutum
  Clone ID: uC-gsflmaxxa067e02b1.pep
FCRKRHKPLSVSVRLLYRCPIVDKYMVLSICLATHIMFCKNTETCPSSCLLMRLGREWRQGCRTSSSFPGPSFIN

SEQ ID NO: 112667 - protein, 130 aa, Gossypium hirsutum
  unsure (1)..(130): unsure at all Xaa locations
  Clone ID: uC-gsflmaxxa067e04b1.pep
MKMFSFSRRPMKLNRVKKVXLSESVHGTRSPIRPSKRNNNTIVESALPAGTSHCNDFDPSTAPEINSSGNSENWMVLSVAGXKPVPRFNHAAAVVGNRMIVVGGESGNGLLDDVQVLNFDNFSWTSASSK

SEQ ID NO: 112668 - protein, 49 aa, Gossypium hirsutum
  Clone ID: uC-gsflmaxxa067e06b1.pep
SCPLVSQFLHLYFPQFFSLYIETHKASVCRGLPFSFFVAMIPPFRRTRG

SEQ ID NO: 112669 - protein, 55 aa, Gossypium hirsutum
  Clone ID: uC-gsflmaxxa067g02b1.pep
NFLQRFSPCTHCFINKLACLPIDNVWVHYIDAGCRSKFLSFITQKIWQTVTIATP

SEQ ID NO: 112670 - protein, 134 aa, Gossypium hirsutum
  unsure (1)..(134): unsure at all Xaa locations
  Clone ID: uC-gsflmaxxa067g07b1.pep
GEEKFCATSLESFVDFGVSKLGKXIQLLSAELEKETQNPEFSIGDQGVKLMGKTEIVCHKMDYAYAVFFCHSIAKTNVYRVPLVGADGTRATILAICHEDTSAWSPGHLAFQTLKVKPGTVPICHVLSIDALVW

SEQ ID NO: 112671 - protein, 80 aa, Gossypium hirsutum
  Clone ID: uC-gsflmaxxa067g08b1.pep
SACTECPRLANTLLTLFSVPRHGPVQYACDRALHSLIYLSVTKHPSTAPVRTQKQPPRAINCHPTINHTHVAEPRVRERK

SEQ ID NO: 112672 - protein, 69 aa, Gossypium hirsutum
  Clone ID: uC-gsflmaxxa067h03b1.pep
MTNESAAQGDTTINETEPKGCNPLWIVLLVRGALRVTFLVGNYILHWYAQNTRSARKETPVSMMKTERE

SEQ ID NO: 112673 - protein, 164 aa, Gossypium hirsutum
  Clone ID: uC-gsflmaxxa067h06b1.pep
RLTHTRGHLVELMNSHNILISNLTFRNSPFWTIHPIYCSNVVIKGMTILAPLNAPNTDGIDPDSSTDVCIEDCYIESGDDLVAVKSGWDQYGIRVARPSSNIIVRRISGTTPTCSGVGIGSEMSGGISNVIIEDMNIWNSAAGVRIKTDKGRGGYIANITIKNI

SEQ ID NO: 112674 - protein, 52 aa, Gossypium hirsutum
  Clone ID: uC-gsflmaxxa069a07b1.pep
QKQKLFMFQKEPPTTETKNRIQRNKYHPLVPTLGFSIQVISKIKKIDGNVLL

SEQ ID NO: 112675 - protein, 28 aa, Gossypium hirsutum
  Clone ID: uC-gsflmaxxa069b02b1.pep
GGLLKMVCDHNQCCPYSLLSSNFQLIIH

SEQ ID NO: 112676 - protein, 61 aa, Gossypium hirsutum
  Clone ID: uC-gsflmaxxa069b10b1.pep
FSGAGGGTSARASFKGRASGDTGASARGGAGAGDQGGVKGCACIIFIIINIIFYFYISFFL

SEQ ID NO: 112677 - protein, 46 aa, Gossypium hirsutum
  Clone ID: uC-gsflmaxxa069c02b1.pep
WMLPIVFAVENRWCSIGMSDLRATPDPQIYKKGPAFGMPGIHADGM

SEQ ID NO: 112678 - protein, 25 aa, Gossypium hirsutum
  Clone ID: uC-gsflmaxxa069c04b1.pep
GPPSPSSAGVGMECLLLSKAISSAS

SEQ ID NO: 112679 - protein, 39 aa, Gossypium hirsutum
  Clone ID: uC-gsflmaxxa069d06b1.pep
RMRTPHHLLTLGVFFTFIAVSDEALNVGMQAIDTAIFVS

SEQ ID NO: 112680 - protein, 46 aa, Gossypium hirsutum
  Clone ID: uC-gsflmaxxa069d12b1.pep
LLRPVHQSQHIAVICEVTVPYYHNRHHQDAYTNASCRWRQRSSTLF

SEQ ID NO: 112681 - protein, 66 aa, Gossypium hirsutum
  Clone ID: uC-gsflmaxxa069e08b1.pep
VFFCPVYKHMLRIVVNEELYEQEKPLSLKDVRCLIVILRQALWQLLWVISSVHPTCGKSISNTSSY

SEQ ID NO: 112682 - protein, 64 aa, Gossypium hirsutum
  Clone ID: uC-gsflmaxxa069f06b1.pep
EERIERITRESGTLWWWWARHVGRANQSEEQQVQGKKKSSGCNSVGSHVWISLFLAVISLRLNA

SEQ ID NO: 112683 - protein, 26 aa, Gossypium hirsutum
  Clone ID: uC-gsflmaxxa069g08b1.pep
TIEGGDVRTNMRITQPQLRNCHKCWT

SEQ ID NO: 112684 - protein, 37 aa, Gossypium hirsutum
  Clone ID: uC-gsflmaxxa069g12b1.pep
LYTKFLQIPVGGGLLEQLAARAQFHQDQIRLLVVHET

SEQ ID NO: 112685 - protein, 49 aa, Gossypium hirsutum
  Clone ID: uC-gsflmaxxa069h03b1.pep
ASAAPAKLEVHHLMLVVLLFEERRLCNRSSARIGCGVARKFSKVPLVIL

SEQ ID NO: 112686 - protein, 35 aa, Gossypium hirsutum
  Clone ID: uC-gsflmaxxa069h08b1.pep
GQSFHGAARYAPESLHLPRVWMRRTVFNNCLTNNI

SEQ ID NO: 112687 - protein, 44 aa, Gossypium hirsutum
  Clone ID: uC-gsflmaxxa069h11b1.pep
LLLILFTRSVLGWFLKDLKLLARLASRRFLETRQAFRQLSQAPP

SEQ ID NO: 112688 - protein, 32 aa, Gossypium hirsutum
  Clone ID: uC-gsflmaxxa069h12b1.pep
VIVDLVDQCGSFKSVCRFLLTVPHMRNFYVRG

SEQ ID NO: 112689 - protein, 77 aa, Gossypium hirsutum
  Clone ID: uC-gsflmaxxa070a02b1.pep
GRHGHALRSIGGSGAATGEPSGLPMERMLRGVHNRKRTTVTVYNRMEVSSAITTSAMIIVRSIHAWVAREERRLRDL

SEQ ID NO: 112690 - protein, 120 aa, Gossypium hirsutum
  Clone ID: uC-gsflmaxxa070a04b1.pep
LCQDRALAAFNLEADKWGVNVQPYSCTSANFAVYTALLLPGDRMMGLDSPSGGHMSHGWYMPSGKKVSAASIFFESFPYKVNSQTGFIDYYKVEEKALDYRPKRLISGSSPAMMESEHAR

SEQ ID NO: 112691 - protein, 61 aa, Gossypium hirsutum
  Clone ID: uC-gsflmaxxa070a10b1.pep
LSILPLKKGCYIPNARTYQVEFKFQHDFIQTNFGQLCIKSYPINEVAINNTKKQKEQERPL

SEQ ID NO: 112692 - protein, 153 aa, Gossypium hirsutum
  unsure (1)..(153): unsure at all Xaa locations
  Clone ID: uC-gsflmaxxa070b10b1.pep
VFANGLYDLVIGVLFLDSNLLIKLTSLRRIRRLETVWDDEXYFHDAAKCRSFVAKRLLQECETKKGNNSSIRAGYGGWLLYTAASAGDIXFVKQLLERDPFLVFGEGEYGVTDIFYAAARSKNSELFRMLLDFAVSSRGCLGGGEGELSDTRP

SEQ ID NO: 112693 - protein, 55 aa, Gossypium hirsutum
  Clone ID: uC-gsflmaxxa070b12b1.pep
GCSWCRGVDSWLCAGGCGEENAQGRRSPRIRTADSASCPEGQNEKFPMWGVIFNP

SEQ ID NO: 112694 - protein, 115 aa, Gossypium hirsutum
  Clone ID: uC-gsflmaxxa070c08b1.pep
HLTCNPFIFFHGSSIISVIKNHILLFKVFIFILFLLIYKKESSICTFFVKIWLVVETWGDYSRRILKGRVMAANTAIPTLLFAKLSTAITFIVCVDMHMRPSKACILLPIIGQID

SEQ ID NO: 112695 - protein, 73 aa, Gossypium hirsutum
  Clone ID: uC-gsflmaxxa070c11b1.pep
MKNEEQARFLFGISLSDLPKWKQFLICSSGFFFGYLANGACEEYVYNRLQFSYGWYFTICQGFEYLFLIYLQG

SEQ ID NO: 112696 - protein, 42 aa, Gossypium hirsutum
  Clone ID: uC-gsflmaxxa070g06b1.pep
GVGEMRFFKILVNVIVQVAGNIFWARDHPLLEQSSRLRQRVA

SEQ ID NO: 112697 - protein, 177 aa, Gossypium hirsutum
  Clone ID: uC-gsflmaxxa070g12b1.pep
GISLIPFLSQELWKIIFLEVLRMETQKLDSHMQSAAAFVQGGILDANDDSCSICLEEFSASDPSTVTNCKHEFHLQCILEWCQRSSQCPMCWQAISLKDPASQELLQAVETERSIRVTAPRNTAIFYHPALGGFELQHLPVGVNDPELEERIIQHLAAAAAMGRTHHASRREGQRRS

SEQ ID NO: 112698 - protein, 72 aa, Gossypium hirsutum
  Clone ID: uC-gsflmaxxa070h03b1.pep
PDTKFENFEMRFLEEKNHADCSVLAMEMHSSANDCDLAMPTSILQYLLTYSFYLLLTASTDFTSAPPMFCRT

SEQ ID NO: 112699 - protein, 43 aa, Gossypium hirsutum
  Clone ID: uC-gsflmaxxa070h04b1.pep
YLIFSFWVNFECNNNISLFDYFGVNSSLVIFGSSELEFLGNGG

SEQ ID NO: 112700 - protein, 52 aa, Gossypium hirsutum
  Clone ID: uC-gsflmaxxa074b01b1.pep
GFMGGSRLPVIYASLFLCSECNTHSGGFTAVSCSLLLALCTEHTPHIAMCHF

SEQ ID NO: 112701 - protein, 37 aa, Gossypium hirsutum
  Clone ID: uC-gsflmaxxa074b02b1.pep
FRFRCRKKLQAVGSYNGEASSEMKLCSYPCSMGKDEA

SEQ ID NO: 112702 - protein, 49 aa, Gossypium hirsutum
  Clone ID: uC-gsflmaxxa074b11b1.pep
FRFWRKNKPSRGAGYLINPCRGLNGTQKLHKKSDGSREKCIIVAMDWVA

SEQ ID NO: 112703 - protein, 44 aa, Gossypium hirsutum
  Clone ID: uC-gsflmaxxa074c01b1.pep
VSVESANYRDQENSVNHPEYGFHSTYKKWNTYITVLRCTPLDTI

SEQ ID NO: 112704 - protein, 42 aa, Gossypium hirsutum
  Clone ID: uC-gsflmaxxa074c11b1.pep
RFRRWARVMEAHKPDSATLEGPVMNASEALMEGAEVHSGMNL

SEQ ID NO: 112705 - protein, 38 aa, Gossypium hirsutum
  Clone ID: uC-gsflmaxxa074d09b1.pep
MARLTGPFMDIIEVLVETAEIQEARMESFFTDFWHDDG

SEQ ID NO: 112706 - protein, 32 aa, Gossypium hirsutum
  Clone ID: uC-gsflmaxxa074f03b1.pep
ISCQPSLVIKSYPFYQNSPYCLQLPTSPFNSE

SEQ ID NO: 112707 - protein, 71 aa, Gossypium hirsutum
  unsure (1)..(71): unsure at all Xaa locations
  Clone ID: uC-gsflmaxxa074g04b1.pep
VNPCKAAEAWEERKPLSIEQVEVAPLQNHEARIEIVPTAVXHTDGYDWKSKGYTRMSSXFLGPDAQGIVES

SEQ ID NO: 112708 - protein, 33 aa, Gossypium hirsutum
  Clone ID: uC-gsflmaxxa074g07b1.pep
SINKDIIESHSTADLRRFSYATAPIADDFLYRT

SEQ ID NO: 112709 - protein, 72 aa, Gossypium hirsutum
  Clone ID: uC-gsflmaxxa074h03b1.pep
SLLKCSFTILCAIALSDLLGCLFEKCFFVCLSETSRPYSSLLTAPSHLPVLSGIGSLNLPLPLRFCLFSIRE

SEQ ID NO: 112710 - protein, 32 aa, Gossypium hirsutum
  Clone ID: uC-gsflmaxxa074h06b1.pep
SSRGDIDYMKPRSFTGEYEERMSLWTEKKDRV

SEQ ID NO: 112711 - protein, 98 aa, Gossypium hirsutum
  Clone ID: uC-gsflmaxxa074h07b1.pep
MESEDDMIDDSVCMGDDFYSCDLSYCYDDDPSDYDNDYYLDDDNDYGLLEDDDDDDQDGIVCRRPQLSYTDLRDADIIQLHEDDISKVSTGLSISRVD

SEQ ID NO: 112712 - protein, 85 aa, Gossypium hirsutum
  Clone ID: uC-gsflmaxxa076a07b1.pep
TVFSSSQPLLHDHQFLLRSWFLNGLAASASSSAGTEGLLCIHGLLYRLRWWILGFGCPSSGPRRSLWTTGPGSSLHGSRRHCLET

SEQ ID NO: 112713 - protein, 149 aa, Gossypium hirsutum
  Clone ID: uC-gsflmaxxa076c04b1.pep
FSRPPRHDSAETIKRALELGISVKMITGDQLAIGKETGRRLGMGTDMYPSSALLGECGDEDIAAIPIDDLIEKADGFAGVFPEHKYEIVGRLQERKHICGMTGDGVNDAAALKKADMGFAVADSTDAARGALDIGLTEPGLSVIVSAVL

SEQ ID NO: 112714 - protein, 116 aa, Gossypium hirsutum
  Clone ID: uC-gsflmaxxa076e02b1.pep
LASGAFHAASMFKPDNPFCRIILRPSYVYKGVLLHLPRCFARRYLNGVDGVIMLQIPEGKKWPVQCVYCNDNLKFSKGWAEFVLDNNLDEGDVCIFELINTKEIVLKVTIFRALRD

SEQ ID NO: 112715 - protein, 75 aa, Gossypium hirsutum
  Clone ID: uC-gsflmaxxa076e08b1.pep
CFRKYKPYAPPVLSVRPQVADNFFFIFFPTGKMLINTCFDMSMIILWWLIHGLAKDVNESEGEGGIKRGKEKQMI

SEQ ID NO: 112716 - protein, 180 aa, Gossypium hirsutum
  Clone ID: uC-gsflmaxxa076f03b1.pep
LLVRVSGVGAPTLTGRRWLHRQIQNLRSINRMNLMVSRTEGISAANMGIDLVNSHIDQSREPMVQQARTEDAGTQPQTLFAERLQDNPSSSLQGRDFLSSRLSHLRRQAVQDSTTTSFGTSVNLTLWPELAGISSNEQLHHCSNGSNIRPDGCDLPFSVRDDDNILMAKEQLQAMVVSHL

SEQ ID NO: 112717 - protein, 41 aa, Gossypium hirsutum
  Clone ID: uC-gsflmaxxa076f08b1.pep
GHGMLQLCEHHVQTIADFIGSSSVGRQNVLRTQSNPSLSLK

SEQ ID NO: 112718 - protein, 128 aa, Gossypium hirsutum
  Clone ID: uC-gsflmaxxa076g01b1.pep
MTSDTSYYDILGVKVSASAAEIKKAYYLKARQVHPDKNPGDPKADEKFAALSEAYQVLSDPDKREHYDKNGKDGIIPGSMLDPSAVFGMAFGSDYFDEYVGTLAMATLASLEVEFEESSVDKEARPKK

SEQ ID NO: 112719 - protein, 114 aa, Gossypium hirsutum
  unsure (1)..(114): unsure at all Xaa locations
  Clone ID: uC-gsflmaxxa076h01b1.pep
LVYYSQFVSFPIYTWQEKSRTVEVEEEEKPKEGEEEKPEGEKKKKTTKTEKYXDWELANEAKPIWLSLLFCHLYXMRNPKDVEKGEYNEFYKKTFNEFLDPLGYTHFTTEGEVE

SEQ ID NO: 112720 - protein, 66 aa, Gossypium hirsutum
  Clone ID: uC-gsflmaxxa076h06b1.pep
GFKYFKFKIKNNNEGLHQNRGNNSPPSSIKPLLYNPQNGKRLFSSYPKVSDCCCNLPHFLFEIVNF

SEQ ID NO: 112721 - protein, 76 aa, Gossypium hirsutum
  Clone ID: uC-gsflmaxxa076h09b1.pep
KGPKIGGRFFFTKRETERNTNTNRKFSFLKYKGFLFFFLSLFYFIVDYQSFIFHLYIYIFDSFYIVSLFYLFLLNI

SEQ ID NO: 112722 - protein, 65 aa, Gossypium hirsutum
  Clone ID: uC-gsflmaxxa088a02b1.pep
VHVPLYAPRVPPTSGAESSPRRRLGFSIASQFALATHASASGCGVQSTALGVHSRINFKKPPRFI

SEQ ID NO: 112723 - protein, 88 aa, Gossypium hirsutum
  unsure (1)..(88): unsure at all Xaa locations
  Clone ID: uC-gsflmaxxa088a04b1.pep
GYAPVLDSHTFYSAVKFFELLTKIDIFCGMVLLHELKFLNNGDACMVKMIPDXSCEVVTFXEYPPLGRFGDRDIFLSMLATSVISVAI

SEQ ID NO: 112724 - protein, 79 aa, Gossypium hirsutum
  Clone ID: uC-gsflmaxxa088a06b1.pep
FIFLSFKCSPFVCLLGCFLVRIMLVVVKKYKSLAWQLSVLLNSLNTVKHPCASSEFKLRLHHARELLFHKTRRFSSARS

SEQ ID NO: 112725 - protein, 112 aa, Gossypium hirsutum
  Clone ID: uC-gsflmaxxa088b02b1.pep
MTETPFSKLSDDVGLNIFSKLEHHPKSWACLACVCTKFSSLIHNTCFKQKCFITIPVVCAGLLSCSCVPPGGWSSLHKLSVCCPGLHHAGVLLDHSDFGFAREIGPEVKYPK

SEQ ID NO: 112726 - protein, 163 aa, Gossypium hirsutum
  Clone ID: uC-gsflmaxxa088b07b1.pep
VAACFPGLTRKDKISECSKDATKKKQVVVQQASQPLSTGTLKHGPAFIFPLSQYQTTANPSGPSKSATSTGKASLTDNSTLGISTSSTVLPGVAGAVSFNYPNLAANQAPYLTILQNNGYPFSISAPVGNPSAIRGGTPSQSLPFFNGPFHSSQMFHPQLQQQ

SEQ ID NO: 112727 - protein, 84 aa, Gossypium hirsutum
  Clone ID: uC-gsflmaxxa088b08b1.pep
PIFLIFRPLLMFSVFVIFGFSPYIHCYNYSACSCTSRLACTCMDGHIVHIQNCIWELSFLLLITRFVYSIGFYKFLLRIKALIN

SEQ ID NO: 112728 - protein, 42 aa, Gossypium hirsutum
  Clone ID: uC-gsflmaxxa088b12b1.pep
MTLEDFFTLAEMKDGLTVPSRVEELVSVMKKEKESVVKICVM

SEQ ID NO: 112729 - protein, 104 aa, Gossypium hirsutum
  Clone ID: uC-gsflmaxxa088d02b1.pep
FRGLGSRWVFPGVCRFASASGTSASCWLRLPVDRWCHLSHFLFASFSSSFSPLLRRCFCFFSECLGFWLGLLDCIFAFLWGCHWKTVFKFRSRICRSGAAINRG

SEQ ID NO: 112730 - protein, 176 aa, Gossypium hirsutum
  Clone ID: uC-gsflmaxxa088d12b1.pep
MEARVCSGVLTKIQSPFLSPLHASKLQSSRNMSILPNTIHTHQFSNASLYLRSHQFSNASLYLRSTFSSRTHGFKQAIKDDSREFELSTLTALSPLDGRYWGKVKDLAPYMSEYGLIYFRVLVEIKWLLMLSQIPEVIEVPSFSAEAQSYLLGLIDGFSMDDALQVKKIERVTNHD

SEQ ID NO: 112731 - protein, 94 aa, Gossypium hirsutum
  Clone ID: uC-gsflmaxxa088f01b1.pep
MACEVINSWTFNGLAGAFLDLFIAYILLCGSSIAYLASKLLGLFGLPLPLPWNGLCGYPNKNICVQAMLVNDPSFKISSVQSSAMKKLPFDSLW

SEQ ID NO: 112732 - protein, 57 aa, Gossypium hirsutum
  Clone ID: uC-gsflmaxxa088f02b1.pep
NNTLTVSDVGARAMNVVSSDGLIMGNMQLMFPDRHALAFETTLTGFHVSMTALMGEV

SEQ ID NO: 112733 - protein, 154 aa, Gossypium hirsutum
  Clone ID: uC-gsflmaxxa088f05b1.pep
QKFYLNFHELMETPTSLISLNFQKKKVAIWNPSTREFKILPPSSVQRPTYPGLTFGVLVYPVEGIDKSFDLWVMNGEEWTKQFSIESIPGVVDPLGFWKNNELFLLNTNYEVVLFDPSTQELKVLGINSYLDHHREYVSLFFTLRAWFQSVEYK

SEQ ID NO: 112734 - protein, 141 aa, Gossypium hirsutum
  Clone ID: uC-gsflmaxxa088g01b1.pep
LFKNRRCLRNGDRNESECYDDDDDGEESKEIEEFNLLGHTMCLKRGRDGCSSSSSSKRMTPEPDLETRKAAVKSWGNQPLSVADPDVFDMMEHEKKRQFMGIELIASENFVCRAVMEALGSHLTNKYCEGMPGARYYGGNQ

SEQ ID NO: 112735 - protein, 111 aa, Gossypium hirsutum
  Clone ID: uC-gsflmaxxa088g10b1.pep
CGNLLLLKQGLAINPFLASFRRKHRCSLVANQTDQKDPLFSFLSAHLDHHHRILVGTIDSEGLSLSHPIQQRNPRDAASLQPLMQVCRFRGFLHQIQHRLFPPASPYLPDA

SEQ ID NO: 112736 - protein, 175 aa, Gossypium hirsutum
  Clone ID: uC-gsflmaxxa088h11b1.pep
LVCGVCGHRAAGLFDKTSLQVSAFPSVILPDFLYLGSYDNASRSELLKTQGITRVLNTVPACQNLYKNSFTYHCLQDDKILQFDDAVQFLEQCERDKARVLVHCMSGKNKSPAIVIAYLMKSKGWRLQPSYQWVKERRSSAELSQDAYQQLQEYEHKLFGSCDNSNLAGAPSFNF

SEQ ID NO: 112737 - protein, 103 aa, Gossypium hirsutum
  Clone ID: uC-gsflmaxxa089a01b1.pep
PTRPKFLKLFLGGIFDHSLRSQRCRTSSPIRGTRSFDGTQSNGYNPGLIVLLGIGGRLITFLGGNYILYSYAQKTLPTRKKKPVSKKKMKRERLNQGPSAPRE

SEQ ID NO: 112738 - protein, 179 aa, Gossypium hirsutum
  unsure (1)..(179): unsure at all Xaa locations
  Clone ID: uC-gsflmaxxa089a06b1.pep
LHEQLPCPQEFMCPLSKKLMRDPVVLSSGQTYERPFIEKWLKAGNRTCPQTQQVLSHTVLTPNHLVSEMISQWCKSQGIELPDPVQNRIQEGVTEAERLHFFSLLDKLSAAALPQQKEAAKELLLLTKNMPSFRSLFEECVDAIPNCSPHSREPNPEWCSYTDLQEDGXTTLLNLSIHD

SEQ ID NO: 112739 - protein, 176 aa, Gossypium hirsutum
  Clone ID: uC-gsflmaxxa089a11b1.pep
MQMVATAAAMDDRPSCFRYPRGNGIGSILPPNNKGTPLEIGKGRVLREGSGRVAILGYGTIVQSCVKAAEQLQMHGISATVADARFCKPIDGDLLKQLAQEHEILITVEEGSIGGFSTHVSHFLCLNGLLDGKLKWRPMVLPDRYIDHGSQSDQIEEAGLSSKHIAATVLSLLGIN

SEQ ID NO: 112740 - protein, 59 aa, Gossypium hirsutum
  Clone ID: uC-gsflmaxxa089a12b1.pep
CNRCSNTHLELEAHHSRELYIRAVTNTTEEPHACPQKPTVRTTSAIRSTESFTATRHES

SEQ ID NO: 112741 - protein, 98 aa, Gossypium hirsutum
  unsure (1)..(98): unsure at all Xaa locations
  Clone ID: uC-gsflmaxxa089b03b1.pep
MVVVYVDTYEVVIVGPKDAYVGDEAXSKRGIFTFXYPIVHLFFNNCDYLRKIXCYSYFFWLCVAPKEHPVLLTXASLNPLGYRFKMTSYYDCDLLITC

SEQ ID NO: 112742 - protein, 60 aa, Gossypium hirsutum
  Clone ID: uC-gsflmaxxa089b04b1.pep
FYRPDAATDDWGTFRCDLYCTERHIPRRVIRFYHSASLSCFGLGFMEDAPGSGSTVLLTM

SEQ ID NO: 112743 - protein, 125 aa, Gossypium hirsutum
  Clone ID: uC-gsflmaxxa089b11b1.pep
AVLEQIISSSNPRSGVLFYLLPLYFPLPFQNFHFLPYFIVFRLIKITSAKKKISSFLESQRMGELKDNDAYEEEFLDYEEEDEKAPDSAFTKAADSAKKLVILIYTFFKENNHSNLYIFLRKTMF

SEQ ID NO: 112744 - protein, 128 aa, Gossypium hirsutum
  unsure (1)..(128): unsure at all Xaa locations
  Clone ID: uC-gsflmaxxa089c01b1.pep
RSLATILPAMKRWLPKLRNEDLIIGRHPYLRSVGKELTRSQVIAAIPGTLLCAXNASQKPRLAHNMLSLACLIQGIAMLSLGSLNIGAIVLTGLFAYEIIXGSTTPERHSVAKAPEAPIKLPVPTTDS

SEQ ID NO: 112745 - protein, 151 aa, Gossypium hirsutum
  unsure (1)..(151): unsure at all Xaa locations
  Clone ID: uC-gsflmaxxa089c02b1.pep
WLSKTALEPSLVYEYGLLFSHNELQKEDLAYFSHEXFFQSMGISVAKHRLEILKVARKEIGEPPKSLSKLILAINKTRKCFNKYVNKLVHHDNNVIKPLPGPEPVRHQDQRRLAVALLQKGSKNEREVKIEQPMVRTTRKVAKSGPLDYRG

SEQ ID NO: 112746 - protein, 64 aa, Gossypium hirsutum
  Clone ID: uC-gsflmaxxa089c03b1.pep
LLLGNSSGRVEGRENVGIWGEILLGEDGKSAMDYTMMKRPGSHTHIFLDCETFDFQKGKVSLDG

SEQ ID NO: 112747 - protein, 141 aa, Gossypium hirsutum
  unsure (1)..(141): unsure at all Xaa locations
  Clone ID: uC-gsflmaxxa089c12b1.pep
MAETTSSTSSPKHLQSPNPLLMDPSSSVPTPPPSSAAASNINPTQTATPLTAPSPTATPTTNPSIDPSLQNLQQQQQQISQISSPPLSNLAQQQQQQQILQQQTQQGVGGLSNFQVQQNLXRSPSXSRINQLQHPKEHGHH

SEQ ID NO: 112748 - protein, 123 aa, Gossypium hirsutum
  Clone ID: uC-gsflmaxxa089d10b1.pep
MGCICNCFVGLLNSVLLTVGIGFVISGAYLNINGNSDCEKVLTTPLIVMGGLLLILSLIGIMGTSCSSTFCMYIYLTLMFLLILGVIAFTIFVFMITNQAVGKAIADSEKVIEPKNPMDFSNW

SEQ ID NO: 112749 - protein, 117 aa, Gossypium hirsutum
  Clone ID: uC-gsflmaxxa089d11b1.pep
MRESEIMLSGRQANEFTIDMRASDKTGGKAFGAFTYTVLKVIKEREGASTNRQLVVRARNEIINLGIGKQHPCLYCNDENADTGFLGYHPNCQHQYGCVSCRLSFKGYRSLEVETLN

SEQ ID NO: 112750 - protein, 86 aa, Gossypium hirsutum
  Clone ID: uC-gsflmaxxa089e07b1.pep
LTRTLTHTTLMGAFRINRWSLMILTYPLLPLYKDSTVKLARIHCISPPEIHGVSHPILLPTCQRTLQGIVVLGFRVTRGSDFMRSY

SEQ ID NO: 112751 - protein, 91 aa, Gossypium hirsutum
  Clone ID: uC-gsflmaxxa089e09b1.pep
LSDRACANGISMSWETIFTVEVRMMIYIMASYYDTHLMVTLKSVRAEQEVITLCLPMWNPDCRDLCMTISCGCDRIDNGFINAHDEAYLLR

SEQ ID NO: 112752 - protein, 161 aa, Gossypium hirsutum
  Clone ID: uC-gsflmaxxa089e10b1.pep
MFWYRNLIKLSTPIKSKTPITKNLLQASLSNFSTANQPPASAQAQPSGLGPTKPHDKPRVVVLGSGWAGCRLMKGLDPKLYDIVCVSPRNHMVFTPLLASTCVGTLEFRSVAEPIARIQPCISSAPGSYFFLANSTAVDTENHEVHCETVTDGTDTLDPWK

SEQ ID NO: 112753 - protein, 83 aa, Gossypium hirsutum
  Clone ID: uC-gsflmaxxa089e12b1.pep
QFHEKLNCNHRAPTRRQPSSLLESSNSFILLNKKKSKFNSMHPLCCISTVSDHSPVKPLPDNVAMPAHAPVTTVTTFLFRLFI

SEQ ID NO: 112754 - protein, 85 aa, Gossypium hirsutum
  Clone ID: uC-gsflmaxxa089f06b1.pep
PTRTVTHTTLMGGILTNRWALMTHRYPLLPLYKVLKGKLARRHYNNPPEISASHTQVSADLTRYTSWLRCSWIPEGTVKRAHELI

SEQ ID NO: 112755 - protein, 91 aa, Gossypium hirsutum
  unsure (1)..(91): unsure at all Xaa locations
  Clone ID: uC-gsflmaxxa089f08b1.pep
DDSRNPTYGALXTDYKVKRSRAHYTKLTEKWSTPLKSTDDISRKHXKSHCLHKFRGSHWTEFDGLKPETXILHEPLGTINMKPLLTINSQP

SEQ ID NO: 112756 - protein, 87 aa, Gossypium hirsutum
  Clone ID: uC-gsflmaxxa089g03b1.pep
LHLFSLFISSPWTSIILTYFYSIFITINPIIFSSLYTAHLPPLENLRFDDFLCSHAENLKSLVCSKLLLCQSFCFLFPFVAVLFFSS

SEQ ID NO: 112757 - protein, 40 aa, Gossypium hirsutum
  Clone ID: uC-gsflmaxxa089g08b1.pep
LLISSLGSQMGEEEELCSLNTAPQGIDHHVHSLVVWLPRS

SEQ ID NO: 112758 - protein, 43 aa, Gossypium hirsutum
  Clone ID: uC-gsflmaxxa089g09b1.pep
NVRKPRNFPLYSMNWSFTCVGKIAHCKLLNNQSKLGILHCSSV

SEQ ID NO: 112759 - protein, 71 aa, Gossypium hirsutum
  Clone ID: uC-gsflmaxxa089g10b1.pep
SFESIDQSAGQYACEHPSELPLELPRSWIGSGIVGHLRGAVRRALIRSFSSVSGAVASAPARDLPCALPGS

SEQ ID NO: 112760 - protein, 106 aa, Gossypium hirsutum
  Clone ID: uC-gsflmaxxa089h12b1.pep
PPPCGLPRRVAPSFASFQSSPRPPPPWFLPLGCSDPPFPVPIERGLFASLQMPLIVSDHSPPCFLFLGFLFEIFVSHYFGLPGPFFFSRAWFPNPWTRVPKFHYPH

SEQ ID NO: 112761 - protein, 43 aa, Gossypium hirsutum
  Clone ID: uC-gsflmaxxa090a02b1.pep
ILYEKYLFCEELFRHWVRLKQRLLNTLTVITAPCVTFSATLSS

SEQ ID NO: 112762 - protein, 60 aa, Gossypium hirsutum
  Clone ID: uC-gsflmaxxa090a11b1.pep
RWLSKWSLNSILSGVPEFKRENSAAIGSENATASRGASARQQHAYSYIRKAQLEECKYGI

SEQ ID NO: 112763 - protein, 53 aa, Gossypium hirsutum
  unsure (1)..(53): unsure at all Xaa locations
  Clone ID: uC-gsflmaxxa090b02b1.pep
KRGLRFSRLVFLHLDLDRALSPFVLIGFTMSYYTPKNILITXADGYIATHIAN

SEQ ID NO: 112764 - protein, 55 aa, Gossypium hirsutum
  Clone ID: uC-gsflmaxxa090c08b1.pep
YCKSIVIWYQSPHSMYSELPVYKYLLNFTFASIIKEYQSIHKMWNPSMGLPAMVE

SEQ ID NO: 112765 - protein, 62 aa, Gossypium hirsutum
  Clone ID: uC-gsflmaxxa090e02b1.pep
QAGGSLPSKVSLPNPPPVIKFSNGYDHRLFSKRKNDDYALAFDRDQDLEAPLDPVRMRKDDH

SEQ ID NO: 112766 - protein, 130 aa, Gossypium hirsutum
  Clone ID: uC-gsflmaxxa090f09b1.pep
MLFFCCSKTRVRGVKMASDVPCCGAEFSLYLLIIVGLVCFAGLMAGLTLGLMSLGLVDLEVLIMSGPPQDRIHAAKIFPVVKNQHLLLCTLLIGNSLAMEALPIFLDKLVPPWAAILVSATLILMFGEIL

SEQ ID NO: 112767 - protein, 52 aa, Gossypium hirsutum
  Clone ID: uC-gsflmaxxa090f12b1.pep
LFVRPRVRKFPEELFNCVAVTLKIISRVPKLENQFRKCFLKLDSYFHLQFFF

SEQ ID NO: 112768 - protein, 71 aa, Gossypium hirsutum
  Clone ID: uC-gsflmaxxa090g02b1.pep
KSAWLHVICYQIFKENVKLDCKSKVFVDMLLISQVFRIANKKLNDSDKFERNQKHYIFIDSFQNLSQILLL

SEQ ID NO: 112769 - protein, 162 aa, Gossypium hirsutum
  unsure (1)..(162): unsure at all Xaa locations
  Clone ID: uC-gsflmaxxa090g12b1.pep
VFIAMYATLARGDVERCLVPESPFYVEGPGGLFEYIERLLKENRHMALEIAEGAGQELLSESLQSMTHKDAIGNKLLQDVALWISQRIKDHFSKERKMTINFRYIDPTYMSRAIPSNACDNVYCTLLGQSAAHGAMAGNTGFTSXLVNGRHTYIPFYRITET

SEQ ID NO: 112770 - protein, 160 aa, Gossypium hirsutum
  Clone ID: uC-gsflmaxxa091a01b1.pep
QIFDGADLSHQMGLSVPQMPQPNNLQFNAHRLPQKVQQLDQVPKLPSTMNSLGSIIQPQQLNDMTQQSRQNLVARTLPSSQVLQPQALVRSNNILHQQQTSNPTHQLPLSLPQNLQQQQQQHLVGPNHPQNLMHSQLPDPLNQHLQVPDNQVQFQLMQKL

SEQ ID NO: 112771 - protein, 122 aa, Gossypium hirsutum
  Clone ID: uC-gsflmaxxa091a04b1.pep
TNIPRDGLNPSQKSAFTHPKTLPSYPPYPFFYFKAPPFKLRSSTLQTPHNTPRSAPESLSLFKNLESYGFNTTQIATLVEKCPEILHSRFNSKFKPRLEYLIEKGFKGIKKKESGNPSTIFF

SEQ ID NO: 112772 - protein, 58 aa, Gossypium hirsutum
  Clone ID: uC-gsflmaxxa091a10b1.pep
PYLSPGEIGSKRSDIYLFLLQPHLVPANRKRNPNLLTSEGMPVRGVLDLPLLEYLGLG

SEQ ID NO: 112773 - protein, 95 aa, Gossypium hirsutum
  Clone ID: uC-gsflmaxxa091c03b1.pep
TAVINSHSLVWITDPFFNKIPFTPHSIFSRNSHFPPEPKNSNAEPPPNKEKNITFHSCPSPLSLSKHLKPPHPHPCLLVSVRLFSSHDRVFDFEL

SEQ ID NO: 112774 - protein, 84 aa, Gossypium hirsutum
  Clone ID: uC-gsflmaxxa091c07b1.pep
RICPLECAPSGGFEPQAPFHPTLSGFKNIRTTVLNGAWPFFLGSANLAADTRWETLEALRCALLWLDLAYNGVLFVESLMRWQD

SEQ ID NO: 112775 - protein, 59 aa, Gossypium hirsutum
  Clone ID: uC-gsflmaxxa091d03b1.pep
CRGIVHPSKLPSNNTLPPAQLKPVQFIVSVKDSTSVLLPRLCMQCTFLSSQQTNVIYFS

SEQ ID NO: 112776 - protein, 85 aa, Gossypium hirsutum
  Clone ID: uC-gsflmaxxa091d04b1.pep
LLSDPNPIIGPITLLHPRREPFEHGLLPIQKLIFTDPLQALIPLKQKLASSSSSSSTHRVNSDALADALQISSEHARLILDTLAS

SEQ ID NO: 112777 - protein, 105 aa, Gossypium hirsutum
  unsure (1)..(105): unsure at all Xaa locations
  Clone ID: uC-gsflmaxxa091d07b1.pep
KYSFRGVDLDAMLDMFIDELVKLFXCRACRRFKSGIKRKPMAXIKKLLKAKREALPGEKLEPDKTYLXNMIIXSEMIGRIIXGVYNGNTLIYVEIKSEMISHKLC

SEQ ID NO: 112778 - protein, 33 aa, Gossypium hirsutum
  Clone ID: uC-gsflmaxxa091e04b1.pep
ITKIIAFLTEKILDFSRATICTYPRCLVQKSLQ

SEQ ID NO: 112779 - protein, 93 aa, Gossypium hirsutum
  Clone ID: uC-gsflmaxxa091e08b1.pep
MADQQEEEDLRMALRMSMQNSPPEPKRSKPREAANLATTTPEESRRLQRELMAAAAEKRMLATGKSVPASGSPLKSDSGGDIGTKEMEIKPKK

SEQ ID NO: 112780 - protein, 79 aa, Gossypium hirsutum
  Clone ID: uC-gsflmaxxa091e10b1.pep
MLTPGGGILRPYCKEQSISSYNGTDTGNEVKALYDLTKRVSSSINDDGFIHKEGYQHAVFRNSSKQNLFADRVSLLIYS

SEQ ID NO: 112781 - protein, 111 aa, Gossypium hirsutum
  unsure (1)..(111): unsure at all Xaa locations
  Clone ID: uC-gsflmaxxa091e11b1.pep
MFAEADSFPRSKIGNIMHSDPNMSIPGSGSEDDMYVRYSSASTSGPAYEAHRTSLEGSPITMSPWNQTTSFMKPSTVISDNDVPANSLIXVRLTREEGHIXYSLAVTKDLL

SEQ ID NO: 112782 - protein, 132 aa, Gossypium hirsutum
  Clone ID: uC-gsflmaxxa091f01b1.pep
MGKTSGKNASGKQGDHAGTVRKNKRAPKRRLLDGEFSEDDNDDEIRYLEKLKTSKISPAYKEDDDEPGKKQKKLSRVSIIENFGTSSSAKDEKRKHRSDRVFEDTDYEEEDEPVTDSELGGKKKRKQRKESV

SEQ ID NO: 112783 - protein, 151 aa, Gossypium hirsutum
  unsure (1)..(151): unsure at all Xaa locations
  Clone ID: uC-gsflmaxxa091g01b1.pep
KDFKILKFLGFMWXSPLSWVMEAAAIMAIALANGDGKPPDWQDFVGIVCLLVINSTISFIEENNAGNAAAALMAGLAPKTKVLRDGKWSEQEAAILVPGDIISIKLGDIIPADARLLEGEPLKIDQSALTGESLPVTKNPGDEVFFCSTCK

SEQ ID NO: 112784 - protein, 73 aa, Gossypium hirsutum
  Clone ID: uC-gsflmaxxa091g11b1.pep
MGAISLEEIKNETVDLEKIPIEEVFEQLKCSREGLSSEEGANRLQIFGPNKLEEKKESKIFKFLGFNGNPLSW

SEQ ID NO: 112785 - protein, 66 aa, Gossypium hirsutum
  Clone ID: uC-gsflmaxxa091h09b1.pep
FYTETPSLLNICVSFYLFTNSQLFFFSISVLSLTISYKVTQSLQLAVTDLFRAEAFFIRSSELQIC

SEQ ID NO: 112786 - protein, 43 aa, Gossypium hirsutum
  Clone ID: uC-gsflmaxxa093a04b1.pep
HYQLIDHRSTRPCIFARVGIPTRECHGYTVEVFFGGSVLRTRG

SEQ ID NO: 112787 - protein, 95 aa, Gossypium hirsutum
  Clone ID: uC-gsflmaxxa093b02b1.pep
PTRSFVTSPSCNEKMRQKNQKKKKQEKIMQENERILKEIEKKKEKKLKKKKSVKRKKKKSRRKKRNLKKRVSLKKHKKRVLWKKREDLKKSLKKK

SEQ ID NO: 112788 - protein, 49 aa, Gossypium hirsutum
  Clone ID: uC-gsflmaxxa093b06b1.pep
LDTPNITNIPPFKTVNFMPIAIFFSSTPILKRPILGSYFFFLWRTFLVH

SEQ ID NO: 112789 - protein, 38 aa, Gossypium hirsutum
  Clone ID: uC-gsflmaxxa093b12b1.pep
PTLPNGVREDNPCAGFSLGHGNFAKDWNHGSIRLHQCD

SEQ ID NO: 112790 - protein, 34 aa, Gossypium hirsutum
  Clone ID: uC-gsflmaxxa093c06b1.pep
MTEYLDHKSFFFANMFSIKCLCCEYESEGEIRFS

SEQ ID NO: 112791 - protein, 44 aa, Gossypium hirsutum
  Clone ID: uC-gsflmaxxa093f02b1.pep
VLSVCSMPAQELEMVLSVSVARISSHESSSSGVVSDVSPNICPA

SEQ ID NO: 112792 - protein, 66 aa, Gossypium hirsutum
  Clone ID: uC-gsflmaxxa093f06b1.pep
HAIADAWGQNANPWYLFPLKIKVKKKTYSCLSSFNGLFKRRQSFWAIVLLRASVYVPHFLFPPIFV

SEQ ID NO: 112793 - protein, 84 aa, Gossypium hirsutum
  Clone ID: uC-gsflmaxxa094c09b1.pep
TSQKRTLGFPNPIWRRMPPAPFRLLCHAWLSPLLAASPPHALTPLSPAKSNRHATERSSQIAKQQKNRHQELFRSAIKAEISPL

SEQ ID NO: 112794 - protein, 139 aa, Gossypium hirsutum
  unsure (1)..(139): unsure at all Xaa locations
  Clone ID: uC-gsflmaxxa094d08b1.pep
MIQLTGKRDDRNHHTAVXSGNPAAVSEILKNTGPDELKELLPKQNQSGETALYVAAEYGYVDLVEEMINYYDLTDAAIKARNGFDAFHIAAKQGDLEILKLLLGVHPELAMTVDLSNTTALHTAATHGHIEIANLLLEA

SEQ ID NO: 112795 - protein, 40 aa, Gossypium hirsutum
  Clone ID: uC-gsflmaxxa094e01b1.pep
KEETMKNICSYHTSTAAWQKDNLYATALESRLIRQHGKQG

SEQ ID NO: 112796 - protein, 41 aa, Gossypium hirsutum
  Clone ID: uC-gsflmaxxa094e04b1.pep
PSSVQQALASTCRALNHVPAGVKDASDKKILADMLLRAVDN

SEQ ID NO: 112797 - protein, 50 aa, Gossypium hirsutum
  unsure (1)..(50): unsure at all Xaa locations
  Clone ID: uC-gsflmaxxa094e09b1.pep
TILHGFQPXSXSKKLRLFIAPRNQMXAWLRMVAANSRPLLKLSLPTPRTS

SEQ ID NO: 112798 - protein, 68 aa, Gossypium hirsutum
  Clone ID: uC-gsflmaxxa094f05b1.pep
NKECQTEETTKRRSCNFLVFSNQREHKIFEIKQSKGDKAKQMGKQKRMILSKTESREHIKRDQSKKHT

SEQ ID NO: 112799 - protein, 62 aa, Gossypium hirsutum
  Clone ID: uC-gsflmaxxa094g01b1.pep
NIKGKGNQLACRNCLITWHIFVDQQKRTKLRFQLSNTQLRWPFSSFPTTSQASFVLVSSPKS

SEQ ID NO: 112800 - protein, 41 aa, Gossypium hirsutum
  Clone ID: uC-gsflmaxxa094g10b1.pep
CSRVRFRLHATWPLLGYNQGFWAEIGFICEPGKNQPYLFRL

SEQ ID NO: 112801 - protein, 77 aa, Gossypium hirsutum
  Clone ID: uC-gsflmaxxa095a07b1.pep
AVLAAFTDERVFADLSVLWSIKDYGIQKLERMITVRFMICFILSIVSLSCSFITLTFFILYLFFFFNSFFLNFLYIF

SEQ ID NO: 112802 - protein, 62 aa, Gossypium hirsutum
  Clone ID: uC-gsflmaxxa095a09b1.pep
TYRYRYMIIVKTMDGQSKTISVQGASTWITVSSVGASYAASSYASSSTWLSSCVKALYSNLQ

SEQ ID NO: 112803 - protein, 58 aa, Gossypium hirsutum
  Clone ID: uC-gsflmaxxa095c03b1.pep
VFPKPRRLVVELRYPFLQCTCIGRARCSGLAMRRHKSRLSREQEKQKGKTWKGNGHVG

SEQ ID NO: 112804 - protein, 35 aa, Gossypium hirsutum
  Clone ID: uC-gsflmaxxa095c04b1.pep
NPNQRRYASPSSLSARSRVKRSRNDASTFGISVAW

SEQ ID NO: 112805 - protein, 37 aa, Gossypium hirsutum
  Clone ID: uC-gsflmaxxa095c06b1.pep
LGVTQEALGSTESSSFTHLKVLPLLMCAPTNSAALLP

SEQ ID NO: 112806 - protein, 145 aa, Gossypium hirsutum
  Clone ID: uC-gsflmaxxa095c12b1.pep
HHAIKIQRAILRRGSAAITKSGCIRSGRKFRWVKLEDSVDTKLLGHPQALTKFCYFLMDALKEKGAKLKPLLCACMLQEPSKVLIVGVCGKPRLGALQGNAFGLAFRNAAEETGAEFFHELFESSWIVLDAVVVNSFMVKLTERL

SEQ ID NO: 112807 - protein, 60 aa, Gossypium hirsutum
  unsure (1)..(60): unsure at all Xaa locations
  Clone ID: uC-gsflmaxxa095d10b1.pep
MYQATGLAAKLWHHKEQXKDHPKDTKQSKKLMNYASGKRNPLLDPSSTIPGMPSERQRLK

SEQ ID NO: 112808 - protein, 69 aa, Gossypium hirsutum
  Clone ID: uC-gsflmaxxa095e10b1.pep
ISLTTCSEAETGKLQNQKSSLRIYPFFCLSTIMRVKDKEQVTPEIDDLDDNYYTKTSCSLLSWGDFLCT

SEQ ID NO: 112809 - protein, 49 aa, Gossypium hirsutum
  Clone ID: uC-gsflmaxxa095f03b1.pep
HDDWVILDEQLGSNPSKMRGWRNSVQETAALKPLFLTIIPPKFLLQWLL

SEQ ID NO: 112810 - protein, 118 aa, Gossypium hirsutum
  Clone ID: uC-gsflmaxxa095f10b1.pep
VLLFRDLSLGHSERESTPLPLQTKPRMLPSKLTSTDLQSPLGQLASQLTDSDLRLTAYDVFLAVCRTSSSKPLSSSASASASASNSDSLGYNSPSQNNNHSPNSPALQRSLTSAAASK

SEQ ID NO: 112811 - protein, 118 aa, Gossypium hirsutum
  Clone ID: uC-gsflmaxxa095f11b1.pep
KRKRKNLSRWVHMENRFKLRISRMFRSSFASCRTRNMSDVIEKPVFSPEKHNGFHLVEPFSSSPPPKSRPFPFASKPRDAINAPKESLPRRKSSARYPSYIVSVAYFDGRTGPPPAPP

SEQ ID NO: 112812 - protein, 126 aa, Gossypium hirsutum
  Clone ID: uC-gsflmaxxa095g03b1.pep
QIANANLEPTSSGSLGGSVNSSRKGNVLQISRSFSVPLNDKDGTTLRRMDSFFRVVPSTPRVKEGEISSNSSVGPDAENGDPDGEDIPEDEAVCRICLVELGEGGETLKMECSCKGELALAHKDCA

SEQ ID NO: 112813 - protein, 48 aa, Gossypium hirsutum
  Clone ID: uC-gsflmaxxa095g05b1.pep
HLLNNGNGEDKNQHLLEAIKYRRWKKTPQHQKWIPPPIPSKPLLTTIR

SEQ ID NO: 112814 - protein, 144 aa, Gossypium hirsutum
  Clone ID: uC-gsflmaxxa095h12b1.pep
FGFCGENMREYMGCLDNVEAIKRLKSTERGERFERHCPEKGKGLNCLVPAPKGYRPPIPWPRSRDEVWFNNVPHTRLVEDIGGQNWISRKGKDKSKVPGGGTQFIHGADQYLNQISKMVPDITFGHHIRVVLDAGCGVACFVAY

SEQ ID NO: 112815 - protein, 167 aa, Gossypium hirsutum
  Clone ID: uC-gsflmaxxa096a03b1.pep
MEPRGACRSNRSSFEKWVAIVLTFLAVVSPLYVNQKPTELELEEQSMDSTSWLCLLFVLLLLAFAFWLYLNQSFTRFDRHWIRPSRYSSYERLVAIGLIVLGGLSPLYINKGTSEFAPDEQPINFASWLPLLLLILTLAIVTLLFCDRSSTKFDPNWIHRVGGSSCW

SEQ ID NO: 112816 - protein, 103 aa, Gossypium hirsutum
  Clone ID: uC-gsflmaxxa096a04b1.pep
DMARHIIVVALVFIAIVGAFAADISPSQAPSRATKTFAPYGSPSSSSNTISASPSESPSPSGSPEESSKGPSGDSPDSDSDEDTDEDEEAEGPDSDDDSDYSA

SEQ ID NO: 112817 - protein, 102 aa, Gossypium hirsutum
  Clone ID: uC-gsflmaxxa096a07b1.pep
LLEFLFVFPFFPFLVAMYSADRCLFVDSIRVSRQDGLFLSDKTGPSSFVSSISLKTQKCFVDKNENVCLVSCSLGGQTLGPVKSRRSGGKGGWVLSVSLSRE

SEQ ID NO: 112818 - protein, 107 aa, Gossypium hirsutum
  Clone ID: uC-gsflmaxxa096b02b1.pep
PNYTKHFSNPSPFKLQPPHAPFTLGSRTPPRMRLAVHITCKKRPKSPMVVSPETLSLSPKSNPKGEGRNSLLSIGRHGDSAKWVLETLTENMGRQKGCSLFFFGRVG

SEQ ID NO: 112819 - protein, 166 aa, Gossypium hirsutum
  Clone ID: uC-gsflmaxxa096b04b1.pep
MAAPEASTAAVPTLYTNNTLRNAFGGVLSFFILLLIGVLAFSIRLFSVIKYESVIHEFDPYFNYRVTQFLTKKGIYKQIQHFVLNFLVLTAEMLVEQSVIYGSMNYSFAPEGAVIICFTSGTTGRPKGVVISHTAIVQSLAKVAHGCTHSNGYSISSFSMSKYPVI

SEQ ID NO: 112820 - protein, 177 aa, Gossypium hirsutum
  unsure (1)..(177): unsure at all Xaa locations
  Clone ID: uC-gsflmaxxa096b10b1.pep
MKVWIAVLIVSWAYWISIVCIQMVSEAARMRNIQQQILAVAEPHADGTYGTFNPDGIMMEYETSWEDISSAIQSATDGIFARAVRLVYDAQELVLSTLRQVIFIIALMPMECNPRANLQLLRMPTSTSSLXIQCLVDNSDTCERVLAPTSHITGQNGFCVDVYQGSYHDGNKVILWE

SEQ ID NO: 112821 - protein, 153 aa, Gossypium hirsutum
  Clone ID: uC-gsflmaxxa096c07b1.pep
MDFACSFKRPMVFHGGEGSISSYRMLDPLCPRFKCRNLSYSVVDPMIGSKTRCLKKMRKSMAYGGCLSSNLVFGGEFNRHLCSAYSSRSLCYGLRDVSKVRVVRLCCQGNDSLAYADGNGRNVEFAESGDGSSSGTVWNGLEDEDRNLHGEAE

SEQ ID NO: 112822 - protein, 31 aa, Gossypium hirsutum
  Clone ID: uC-gsflmaxxa096c11b1.pep
FSPPYYLSNHMGHFLFHIDISIRGRILNARI

SEQ ID NO: 112823 - protein, 61 aa, Gossypium hirsutum
  Clone ID: uC-gsflmaxxa096d09b1.pep
VQILVLRRLRRSFVWRHLVCELGRCLLPWLRSLRQRRVCRRECSSSSCPWCWRGGPKEEAV

SEQ ID NO: 112824 - protein, 171 aa, Gossypium hirsutum
  Clone ID: uC-gsflmaxxa096d12b1.pep
YSAAQSFKCSSSDPSTCHALVGYITVNNTNLGAIQSLFSVKNLRSLLGSNNLPLNTKRSYAIPAQQVIKVPINCLCNNNTGTSSGAPIYTVQPGDGLYHIAAEVFSRLLLYQQIAAANNIRDANLITIGDKLKIPLPCSCDEVDGQKVVHYAHMVKSGSSSGEIAQEFGTN

SEQ ID NO: 112825 - protein, 62 aa, Gossypium hirsutum
  Clone ID: uC-gsflmaxxa096e01b1.pep
FTGHCPNTKTTYSFFKSLFFLYFNNLLSKYIFYKLFNKFINYLILKMFIKYFKVKMVPKKAY

SEQ ID NO: 112826 - protein, 51 aa, Gossypium hirsutum
  Clone ID: uC-gsflmaxxa096g03b1.pep
VFVINSSLAFALQLLSFSVSLSLSGLSTKLSLSSHLTTHGKGQLAQTYGHT

SEQ ID NO: 112827 - protein, 93 aa, Gossypium hirsutum
  Clone ID: uC-gsflmaxxa096h01b1.pep
SLPMPTIAAVNGHAAAVGVVLALCHGYVLMSRHRSVLYMIALDVGIKIPEPFMALFRAYISGSARLDLLLRGLKIKGEEALQMGIVAAVYDGE

SEQ ID NO: 112828 - protein, 183 aa, Gossypium hirsutum
  unsure (1)..(183): unsure at all Xaa locations
  Clone ID: uC-gsflmaxxa096h04b1.pep
TILSCLLQLLSLGLILSSAASIQTPKHYVVYMGSSAGETAESDHPQLLSTVIPREERERISITNHYNHALRGFSAMLTDDEASELSGRNGVVSVFPDSILQLHTTRSWDFLDDNSNPKLNHGSYLPHKSTYDVIIGMIDTGIWAESPSFKDEGMGEIPKRWKGVCMEGPDFXKSDCNRKLIGA

SEQ ID NO: 112829 - protein, 106 aa, Gossypium hirsutum
  Clone ID: uC-gsflmaxxa096h11b1.pep
TTGAARNLIMLNMLNSNMGVLDVIQSTFLYALCISSDFIHILLHGYMRFNRRWRSFPFFFTVIEPMVVIMVILRCRGTNITPVSVPTILALAVPTFLAPFDAGRMG

SEQ ID NO: 112830 - protein, 135 aa, Gossypium hirsutum
  Clone ID: uC-gsflmaxxa097b05b1.pep
MGTNRKRRIKALEPHSEINVHEGCKGVDKSRKTSVEQQLQGATGKTEKDEHSSPSGSGEASSSRSKTTKTRIVEGITISALDLNTEERLYPSTKIKLQLFPIDESTRLGLEKDGFHPYLELTLSARKKIFSVLKH

SEQ ID NO: 112831 - protein, 163 aa, Gossypium hirsutum
  Clone ID: uC-gsflmaxxa097b10b1.pep
LVVLTWRSLLRMSREWKYYWLRLILYMILTLCIGTVFSGLGHSLSSVVKRVAAIFVFVSFTSLLSIAGVPALLKEVKIYASEESNQHSGALVFLFGQLLSSIPFLFLISISSSLVFYFLIGLRDGFSLLMYFVLNFFMCLFVNEGLLLAVTSFWQNILWSILT

SEQ ID NO: 112832 - protein, 147 aa, Gossypium hirsutum
  Clone ID: uC-gsflmaxxa097b12b1.pep
SFIVMELCEGGGVLYKILGEKDSRYSEKDAAFVVRQMLKVAAECHLHGLVHRDMKPENFLFKSTKEDSPLKATDFGLSDFIRPGKRFQDIVGSAYYVAPEVLKRKSGPESDVWNIGVITYILLWGKRPFWDKTEDGIFREVLKNKPD

SEQ ID NO: 112833 - protein, 78 aa, Gossypium hirsutum
  unsure (1)..(78): unsure at all Xaa locations
  Clone ID: uC-gsflmaxxa097c03b1.pep
CSNNTMGHLLSAALLXFSWIQRGWVGHDYGPFQDMSSTKFNRGAQILTGNCLSXIIIDWWQRDHNAHHIDRYKLEIDP

SEQ ID NO: 112834 - protein, 134 aa, Gossypium hirsutum
  unsure (1)..(134): unsure at all Xaa locations
  Clone ID: uC-gsflmaxxa097c11b1.pep
LLALKALPGNGGLFYTYLGEQLEIVRRLPDAHPQYETLNNTFVRALVTMHNMPRIRIMDSSTLTEHTLITNTRKTFDRALXASPVTQHDRIWEPYLVLVSXRGIPTETSLMVYRRYLKYDPRHIEDIIEVLVNS

SEQ ID NO: 112835 - protein, 60 aa, Gossypium hirsutum
  Clone ID: uC-gsflmaxxa097d04b1.pep
KKPGGTYKTQGDLMEMGPVFFAHYGGSGPPYSTGSFNGLKQGQKIYLEDTPSLPTCDGTT

SEQ ID NO: 112836 - protein, 88 aa, Gossypium hirsutum
  unsure (1)..(88): unsure at all Xaa locations
  Clone ID: uC-gsflmaxxa097d05b1.pep
LSRRGDSFYTDVLDPFAHNKEXAKILNMKDHMMESPCLSACQGMGGGLLRIWDSQETDDSMNFTIDMPWLGKEEDKVSVEHNTLVIKG

SEQ ID NO: 112837 - protein, 66 aa, Gossypium hirsutum
  Clone ID: uC-gsflmaxxa097d07b1.pep
PSFPYLFLLKPECHNLLIILYRSQWLQRHLRMSIILCSSPRKHRLSSLFRPHAVPNAKRRSLQGRF

SEQ ID NO: 112838 - protein, 143 aa, Gossypium hirsutum
  Clone ID: uC-gsflmaxxa097e04b1.pep
HSSAHASVQLGGTIYEVGDWVKFRRSVTTPTYGWRDATHKSVGFVQNVVDRDNLIVSFCSGEAHVLVNEVVKVIPLDRGQHVKLREDVKEPRFGWRGQSRDSIGTVLCVDDDGILRVGFPGASKGWKADPAEMERVEEFQVGD

SEQ ID NO: 112839 - protein, 84 aa, Gossypium hirsutum
  Clone ID: uC-gsflmaxxa097e05b1.pep
MLEPREADIPALFLVLVVLPLVTYFLLGKWSEVSKKREKVSLLAHLAAEEALRAETMAAASVIPVVSVSKKGLHVCARCFGPST

SEQ ID NO: 112840 - protein, 137 aa, Gossypium hirsutum
  Clone ID: uC-gsflmaxxa097f03b1.pep
SVWDPFQEVLRGGSSLVAAASPESRFELTKLDWKETPEAHVFKADLPGLKKNEVKVEVEEGRVLCIRGEKSVEKEVSGGTWHRVERSSGAFVRRFRLPEDAKLDKLTACLERGVLTVTVPKKELKHPPKRTIQIHVQ

SEQ ID NO: 112841 - protein, 147 aa, Gossypium hirsutum
  Clone ID: uC-gsflmaxxa097f04b1.pep
RGVATETKTNLVKVKNSGQDGSSKPKFDAVINRKKIETSSKQPVDSKQKSVITKAEVKSKTNSSSSKTTATTKTKVREKKVYTLPGQKHDPPEEREPLRIFYESLSKQIPTSEMAEFWMMEHGLLSPERARKAYEKKQRRQKQIRAG

SEQ ID NO: 112842 - protein, 116 aa, Gossypium hirsutum
  Clone ID: uC-gsflmaxxa097f06b1.pep
MTLEEFLKQCEQSGDGAFAALKSLLEKLEDPKTRTEARVFLSDLQSRVGSSDDCFHKYHFRIQDIYLDRSEGYQGRKKLTMMVIPSIFMPEDWSFTFYEGLNRHPDSIFKEMTVAE

SEQ ID NO: 112843 - protein, 127 aa, Gossypium hirsutum
  Clone ID: uC-gsflmaxxa097f07b1.pep
LSMSAFLLLSLLSLSHFFIFSSSSHHPPHNSPVYASESSQIRLACKSTRFPQPCESSLSRSSLLPPKSTSLQFIQSAISVSSDNLKTGQSMVKSILDSSKGNLNPFNAADICLNILSNSDYRIRSTN

SEQ ID NO: 112844 - protein, 151 aa, Gossypium hirsutum
  unsure (1)..(151): unsure at all Xaa locations
  Clone ID: uC-gsflmaxxa097f09b1.pep
HASGRSQVTGQTMDEKLGRMVTRVVLPRVVMHSRHHYGAFSENCTGSELEDGGGRGTSXSHWEKRLLMNEIMTGSRDTRSVVSKMTLAMLEDSGWYQANYSMADRIDWGRHQGTDIGTSTCNLWKGAYHCYTTKLSGCTYHREAEGYCPIE

SEQ ID NO: 112845 - protein, 102 aa, Gossypium hirsutum
  Clone ID: uC-gsflmaxxa097f12b1.pep
LTRPVKLRGGREFSRRNLASLGKNSSISTGNSVNDDEMEDWELEFVGEIDPFSYQAPKKRKKQEKSRVLNDEEGMDWCLKARKMALKSIESRGLAHKVEDLI

SEQ ID NO: 112846 - protein, 79 aa, Gossypium hirsutum
  Clone ID: uC-gsflmaxxa097g01b1.pep
PLVRAYLQPLRVDIKAALAIFWLIPHPLVSLDNGNDKATYVTTHYTIKHWKNCNEKLRLNEEIINKCYTTGFRYKLLLQ

SEQ ID NO: 112847 - protein, 52 aa, Gossypium hirsutum
  unsure (1)..(52): unsure at all Xaa locations
  Clone ID: uC-gsflmaxxa097g07b1.pep
LVQDRIVSSFLSTLILFHFFPDFICTAESGFHSDYYXLFFSFSLNPSHSIPY

SEQ ID NO: 112848 - protein, 167 aa, Gossypium hirsutum
  Clone ID: uC-gsflmaxxa097h06b1.pep
RRHLLTSGWSAVVNKKKLGSGDAVLFLRGEDGELRLGVRRAAQIKDGSSFPSSCSQQLNCSNFADVVHAVSMKSVFSIYYNPRASSSDFVIPVHKFWKCLDPSFSIGMRFKMQFEAEDAAERRHSGVITGISDINPVRWPGSKWRCLMVRGDDIDANRHGRVSPWEI

SEQ ID NO: 112849 - protein, 80 aa, Gossypium hirsutum
  Clone ID: uC-gsflmaxxa097h07b1.pep
VQAYSPALGPAVWVPVWGPDFRFGSHIWRPIWISVSHCDVAPLIASAMGSTNGTSHDSSLVCPRVFIYPPPVVLRVVCKE

SEQ ID NO: 112850 - protein, 113 aa, Gossypium hirsutum
  unsure (1)..(113): unsure at all Xaa locations
  Clone ID: uC-gsflmaxxa097h10b1.pep
MAEHLASIFGTEKDRVNCPFYFKIGACRHGDRCSRLHNRPTISPTILLSNMYQRPDMITPGVDPQGQPIDPRKIQEHFEDFYEDIYEELSXFGEIESLNVCDNLADHMIGNVY

SEQ ID NO: 112851 - protein, 57 aa, Gossypium hirsutum
  Clone ID: uC-gsflmaxxa098a08b1.pep
NNHGKLALKLYLVEWKNGEIRGESGKWEENKFRLCFVKNKARGKKIGRSASLKLCIF

SEQ ID NO: 112852 - protein, 32 aa, Gossypium hirsutum
  Clone ID: uC-gsflmaxxa098a11b1.pep
RKKLFIHCYLNNLRCGVLITLGSQIKKVRPPS

SEQ ID NO: 112853 - protein, 178 aa, Gossypium hirsutum
  Clone ID: uC-gsflmaxxa098b06b1.pep
LLVRPRVREVHMQGRPLNCEAGRKSRFYGEDGEQCGVEQLALQYYATEGGWQGVHTESGIWMTIFGLLMWDILFSDVPNVFRTRFQTAPLDMDTDHFYLARKSLIEPQLQKIHDGLAEEILKTSWELHMGTACRGVNWDQHSLSDLRAAVSCIRGPCLASLCRHLAQDYRSWLSGMPD

SEQ ID NO: 112854 - protein, 164 aa, Gossypium hirsutum
  unsure (1)..(164): unsure at all Xaa locations
  Clone ID: uC-gsflmaxxa098b12b1.pep
SPERVVHRSSKEDGSSSSSDEDAKPSCISRVKHRLRRHRLRRRRRSDSSHKKLFAAEDFAGIAHLTLINAEMKFKDKWLACVSFGEQTFRTNVSTETDKPVWNCERKLLLEKNGPLVARISVFETNRLSKNNLIGYCEINLLDYLTQDSDSDFXTFDLIDPGSS

SEQ ID NO: 112855 - protein, 44 aa, Gossypium hirsutum
  Clone ID: uC-gsflmaxxa098e06b1.pep
RVFIFLFENRKEIINSFKYYIEKINLFIIFYHLSRYLLTVLLTK

SEQ ID NO: 112856 - protein, 43 aa, Gossypium hirsutum
  Clone ID: uC-gsflmaxxa098e12b1.pep
LSRPPTRPPTGTVLRLKGWGNYILGKGLLLKILSKWAIIWARV

SEQ ID NO: 112857 - protein, 75 aa, Gossypium hirsutum
  unsure (1)..(75): unsure at all Xaa locations
  Clone ID: uC-gsflmaxxa098f01b1.pep
QTYHNKRCCGGIGTCIIVDTCILILMRRREVKDYXTAKSIEGVYEKCQAGIVVGDLGASDAWGLETAAPLRKNCN

SEQ ID NO: 112858 - protein, 163 aa, Gossypium hirsutum
  Clone ID: uC-gsflmaxxa098f04b1.pep
MQNSNLTWKASSQSLFLKVLFWQELFNMSTTPSDPLLQVETTCGTLLYELQIIWDEVGETDTDRDEMLLELERECLEVYRRKVDQANRCRAQLRQTIADSEAELAAICSAMGERPVHIRQSDQNAGSLKEELSKILPQLEEMKKRKIERRNQFVQVLQQIQII

SEQ ID NO: 112859 - protein, 74 aa, Gossypium hirsutum
  Clone ID: uC-gsflmaxxa098f08b1.pep
KLELFDFRRKRNPKRDKKGKNWREIEGRRDFFVNNRRKMGTRKLFFIFNWLFLLTDPYGPFIVGLIMKDSKFWI

SEQ ID NO: 112860 - protein, 83 aa, Gossypium hirsutum
  Clone ID: uC-gsflmaxxa098g01b1.pep
IFLTKALMIRYPNHDLWSHKVDIAYRDHDMRHQGCIWMPTDNDEDAHTCEIAHHPCIWPLQPNPTYGVILSLDFILFLLSALL

SEQ ID NO: 112861 - protein, 148 aa, Gossypium hirsutum
  Clone ID: uC-gsflmaxxa098g03b1.pep
MSALRFSSRFNPMLSNIILVQTKSLLFSFSSFSSSVRKPCKTLCCSSSSPLSGLEDELVGYIFGKKKATEVAHLVWRHVLHKGDIVIDATCGNGYDTVAMLKMVADESGHGRVYGMDIQTEALENTSSLLDETVTQKEKELVKLFPIC

SEQ ID NO: 112862 - protein, 98 aa, Gossypium hirsutum
  Clone ID: uC-gsflmaxxa098h01b1.pep
CGILMRFTDKSKSGYDVTFHHNIVPAKATHLTNSMKFLNIKSREGINIEATKGSRLTLEPKNMRKTEIQRKAPHNDLSSWNKINSQGVDGSGITSTRI

SEQ ID NO: 112863 - protein, 174 aa, Gossypium hirsutum
  Clone ID: uC-gsflmaxxa098h06b1.pep
FFSKALSPLYLRDLYNSTQGVSKASALHFTSLHSPIKKKKREFQNPINKSNSSLASQLQITPNGQTLDPHDEPQVFHEDYYSTCSTPYVSAPSSPGRAPGPGPGSINGYGGCYYSAPASPMHFALTSASSSMVASTQPSSPDNNPVPLGSEFEFSARYGASSGSGQTGTMSSAD

SEQ ID NO: 112864 - protein, 132 aa, Gossypium hirsutum
  Clone ID: uC-gsflmaxxa098h09b1.pep
MAAVAVHHFAQCITCHAWSPDHSMVAFCPNNNEVHIYKLVNDKWEKVHVLQKHDQIVSGIDWSGKSNRIVSVSHDRNSYVWNREGPEWVPTLVILRLNRAALCVRWSPKENKFAVGSGAKTVCVCYYEQEKY

SEQ ID NO: 112865 - protein, 175 aa, Gossypium hirsutum
  Clone ID: uC-gsflmaxxa098h11b1.pep
CISRSNHNIIGGFKHNPRGSNQRFRNLDLLQEDINGKKEIKIGLVNINSNEEIQYQLPGSVVSTVHVRFDRVSKKRKWEDFFPFRIDENQQNCPEIPMPALEKYQDLDVVVAKLPCKGWSGKSGMRDVFLLQVNLVVANILVESGWVTPEVKPAVYAVFVGSCGPVQEIFRCEDL

SEQ ID NO: 112866 - protein, 44 aa, Gossypium hirsutum
  Clone ID: uC-gsflmaxxa106a02b1.pep
ALANIQTKEPINIASICKNTSIDDAENHLSHFFLGLMHTKETPP

SEQ ID NO: 112867 - protein, 65 aa, Gossypium hirsutum
  Clone ID: uC-gsflmaxxa106b01b1.pep
HNFFLPPEGDNEKGGVGLKKMCFEMAPINDNNEAISIGRINAYGPGRRTHPYLSKGTTPMAPLLP

SEQ ID NO: 112868 - protein, 78 aa, Gossypium hirsutum
  Clone ID: uC-gsflmaxxa106b04b1.pep
KKNRITQLQPSSHSQHSHLYMFDLEHKPQSNNTQRRRLKLQNFTSKATDHNHLKIKFAENQIENFVKFNSKGIPRTRG

SEQ ID NO: 112869 - protein, 62 aa, Gossypium hirsutum
  Clone ID: uC-gsflmaxxa106b09b1.pep
FFPSHVSQLTSTSQAEKIHTGQHGGASVNAPMARLEPRKKVRDEDDFLVPVFVNSETGLQHS

SEQ ID NO: 112870 - protein, 77 aa, Gossypium hirsutum
  Clone ID: uC-gsflmaxxa106c05b1.pep
DMRIFEKKVNVDEEEGEVKIGFARDRKEVYKEGDGILVGEVKGNNNFIGKVMLICLLLADYSDCFFPSVFLGSRSRG

SEQ ID NO: 112871 - protein, 70 aa, Gossypium hirsutum
  Clone ID: uC-gsflmaxxa106f02b1.pep
FKGHCFAQNEKLHHSSSSSSSLVSKARKMIVYFSLLQSFLWWVFFTVFGVVCLWCTESGRVGGRVGKRVG

SEQ ID NO: 112872 - protein, 131 aa, Gossypium hirsutum
  Clone ID: uC-gsflmaxxa106g08b1.pep
FITAAVNLYDHPLMAAQTVPKLCEILEGDLCNMPLTSVSLENIDPLGSRLSTCLPISAGSSYAHDMVVATNQMEFIDTIITSMPSASSSSSSSLSALSSGQYITNPNLPSGGWDPWHDPFTFSYMIGVRFS

SEQ ID NO: 112873 - protein, 77 aa, Gossypium hirsutum
  Clone ID: uC-gsflmaxxa107a06b1.pep
LSEAVLLKIEGKSFLDTGTRRPNRILVGKTNFAWLEALAGCQPKDPRRVAKTRVFATFRGSYGLLIKHNHQLLPRRS

SEQ ID NO: 112874 - protein, 124 aa, Gossypium hirsutum
  Clone ID: uC-gsflmaxxa107b07b1.pep
FSQADKALASAISFKDGEDFDILQSPRNSVDGSQNENPVPRSMPILPVGTPEHHDVGLSYSKDSEDKNGSASEVVSIEMETLKGISEESRKVNAGVSVAACSVGQATDANENEGSLFNENLSSA

SEQ ID NO: 112875 - protein, 103 aa, Gossypium hirsutum
  Clone ID: uC-gsflmaxxa107c01b1.pep
MQGQRGTFGSLPETLFDHGSSSSNAAIDQQVCWNNIRNPIESRLSDCLLSANDANIGHGNSNAGEDQELGRCSLGEPSSSGTLSVVSHNERKMNHGWSFSMSA

SEQ ID NO: 112876 - protein, 177 aa, Gossypium hirsutum
  Clone ID: uC-gsflmaxxa107h12b1.pep
TRSAPTTSSIPKSASLTSSLMKSAPATSSVTKSGTAASSITKPSAATTSKSSVQSRGTSPTVKSRPWKASEMPGFSLETPPNLRTSLPERPVSASRGRPAAPGARSSSVEANSSGRPRRQSCSPARSRASSGSFGNGSSIRSVRRADANGSDNESPVVIVTKMVERVVNMRKLVPPK

SEQ ID NO: 112877 - protein, 49 aa, Gossypium hirsutum
  Clone ID: uC-gsflmaxxa119a03b1.pep
NQYFTLVWRLLGQFLIITHCWPLLSSAKWSCTHQLCYSCSFRDQSVLTR

SEQ ID NO: 112878 - protein, 50 aa, Gossypium hirsutum
  Clone ID: uC-gsflmaxxa119b08b1.pep
IIPLQLFNSSCSESRSRSTNDSENTAIMWRRALMDSKACQSWCLIAKRGS

SEQ ID NO: 112879 - protein, 34 aa, Gossypium hirsutum
  Clone ID: uC-gsflmaxxa119d04b1.pep
KYAWVSEIELRRADHALPCKRNPKIALRECGREG

SEQ ID NO: 112880 - protein, 59 aa, Gossypium hirsutum
  Clone ID: uC-gsflmaxxa119e03b1.pep
TRSSSLLVLRGFSFGLISIFSCHSFIAMCIHGQNTHTNNQQLDDSLREREKPKSSSLLL

SEQ ID NO: 112881 - protein, 47 aa, Gossypium hirsutum
  Clone ID: uC-gsflmaxxa119h12b1.pep
SGFPVSFNHPPNPRQSPHNLYRKSCLKLWTGRITIGNPSALKSDPNL

SEQ ID NO: 112882 - protein, 54 aa, Gossypium hirsutum
  Clone ID: uC-gsflnu33B002a04b1.pep
KIRFYNILIKILRKFIIHLSLCKNSFIEQVHDDYFVYNLIKIYRYCIIVLNFML

SEQ ID NO: 112883 - protein, 110 aa, Gossypium hirsutum
  Clone ID: uC-gsflnu33B002a11b1.pep
KAEMVTIVVATTSDPASINPAYALLAMPGWLPVPAPSLLQQGIKSFANKNVRFLQHDKGIVEEDDLDRRWEEATGEAVDEVIFFSKHTAVSNRPALTVHPFGVPHLREGD

SEQ ID NO: 112884 - protein, 117 aa, Gossypium hirsutum
  Clone ID: uC-gsflnu33B002b04b1.pep
MGSEKHGFIWLSGLLFLNIFVLSTADVHYYEFSLQESLFTKLRSTKIILTLNGSFPGPEIRVRRGDTAFVNVHNQANYAVSLDWEGVTDTIDGSNNTIQPGRNFTYNIELGDEIGTL

SEQ ID NO: 112885 - protein, 82 aa, Gossypium hirsutum
  Clone ID: uC-gsflnu33B002b07b1.pep
TRPVGGHIVFRDSCFDRSGHCKQKHDPSLYCEPRCYTQGFKECHASDDSRHSFKLYIVGYKCMSAYVNHKKIQNHICWIWEK

SEQ ID NO: 112886 - protein, 66 aa, Gossypium hirsutum
  Clone ID: uC-gsflnu33B002b09b1.pep
ASQGEQQEWGILIRETHIPRHKEHAGDRKILLVCSRAHSQQTLTRAPRLQRMSRPLGVLECISSAS

SEQ ID NO: 112887 - protein, 31 aa, Gossypium hirsutum
  Clone ID: uC-gsflnu33B002c04b1.pep
NPQTGTRARVSFLSRPRMHPTRSKQDLGSDS

SEQ ID NO: 112888 - protein, 48 aa, Gossypium hirsutum
  Clone ID: uC-gsflnu33B002c11b1.pep
KKKMVAISKIATGNGHGEDSPYFDGWKAYETNPFHPIDRPDGVIQNGS

SEQ ID NO: 112889 - protein, 31 aa, Gossypium hirsutum
  Clone ID: uC-gsflnu33B002d02b1.pep
HANPRPFYLMPFDCQCIEPGSLADIRMCSKQ

SEQ ID NO: 112890 - protein, 39 aa, Gossypium hirsutum
  Clone ID: uC-gsflnu33B002d12b1.pep
SFIGVKLEQPRQHELKRTGINTDRIKIADFITDAISLFL

SEQ ID NO: 112891 - protein, 111 aa, Gossypium hirsutum
  Clone ID: uC-gsflnu33B002e04b1.pep
LGCLPFILPFPTMHLTLAMGASISCAYVSSPLSHIPVFSVLECCHFAHIVLRLFAFAFFFSAFYRCFSFQGCLLSDHAFSISLEGFPLVGLSAYPLILTLPDAFCSVRRRT

SEQ ID NO: 112892 - protein, 79 aa, Gossypium hirsutum
  Clone ID: uC-gsflnu33B002e05b1.pep
NCLSRVSLKPKTKQTFDKTHNPARRSLARTRASDTIDNAKTNIQDKEGIPSDQPRMTFPGKQFEDRRTSGRIQTFKRRQ

SEQ ID NO: 112893 - protein, 47 aa, Gossypium hirsutum
  Clone ID: uC-gsflnu33B002e07b1.pep
GREGRTRGFRGEFLDLYFLSLHYWEKPIYFFSNKSVKIFPNRPFRPS

SEQ ID NO: 112894 - protein, 65 aa, Gossypium hirsutum
  Clone ID: uC-gsflnu33B002e11b1.pep
DAWAGGSLQLAILNAQIKWPAGPKLQYPEALHQFVTWMLQPQPSVRPCIDDIIFHVDKLISKFLQ

SEQ ID NO: 112895 - protein, 113 aa, Gossypium hirsutum
  unsure (1)..(113): unsure at all Xaa locations
  Clone ID: uC-gsflnu33B002f04b1.pep
SIQEHGRGKVLETVVEIQDRHDAAKEIEKSLLELHXQVFLDMAVMVEAQGEQMDDFEHHVMNASHYVKDGSKELNTAKQYQRSTRKCMCIGIILLLXIVLEIDIPIGTSFFRF

SEQ ID NO: 112896 - protein, 34 aa, Gossypium hirsutum
  Clone ID: uC-gsflnu33B002f07b1.pep
GMILSAFVLSVSQFHFLSQMVSLMAQFVLMQLFW

SEQ ID NO: 112897 - protein, 51 aa, Gossypium hirsutum
  Clone ID: uC-gsflnu33B002g02b1.pep
GRQKSKSGEINKSYKRKIYSFLFLSKNLTQSSQVIHALKAESFPSLYEAKT

SEQ ID NO: 112898 - protein, 73 aa, Gossypium hirsutum
  Clone ID: uC-gsflnu33B002g06b1.pep
RRVDLILIMHSTCLMKYLCELLAFNEFTLHMMIVHELKSIGWSVSKMHKPHFSYWLFFSSHALVDCCRSHIGA

SEQ ID NO: 112899 - protein, 49 aa, Gossypium hirsutum
  Clone ID: uC-gsflnu33B002g07b1.pep
FLCYLSGRRLYYSIAKGRKRESEEKLSFIMRRTVGCLQDVDPSKIVAVV

SEQ ID NO: 112900 - protein, 37 aa, Gossypium hirsutum
  Clone ID: uC-gsflnu33B002h03b1.pep
SSLMLSSRFSSLASFFSVPPFLVAKLFPVRIRCSRAS

SEQ ID NO: 112901 - protein, 52 aa, Gossypium hirsutum
  Clone ID: uC-gsflnu33B002h06b1.pep
HMSGGVGKTGYVQNPCRQKSDADKMKHVIMETIQQLSHEVTSKSLRIADLRC

SEQ ID NO: 112902 - protein, 115 aa, Gossypium hirsutum
  Clone ID: uC-gsflnu33B003a05b1.pep
ISFYLPPLCISFNVVFLFFSFDKVFFMFMKKKVKAKIKIKLATHILSHIYKPLLSIIALTNLFDSFNDLVHRFASLEDLTSRDLLQSIFDKVFQACSLNLLTNPFNHLYLLTYNI

SEQ ID NO: 112903 - protein, 70 aa, Gossypium hirsutum
  Clone ID: uC-gsflnu33B003a10b1.pep
WFLWNRWPGRPLFYFVFFFLNLFFFNQRHATLSVHSVHFIIIFRFYRLPLSPIPSHRARRSNHRNSSAAW

SEQ ID NO: 112904 - protein, 107 aa, Gossypium hirsutum
  Clone ID: uC-gsflnu33B003a11b1.pep
MDYSLAALKLLCGQLKDARGTPSQSALTLGGILFQRVWLQGVLVSNDDEDHLLLDDSTGIVELNLYGDFRLRQWKTGMYAMVVGGYFVRTGDIPVIKVHKIVDLTSF

SEQ ID NO: 112905 - protein, 44 aa, Gossypium hirsutum
  Clone ID: uC-gsflnu33B003a12b1.pep
LYDNLVYQIKYLHRCDSHLLNLLLKSLIHYTFARSHCDFGVHEL

SEQ ID NO: 112906 - protein, 146 aa, Gossypium hirsutum
  unsure (1)..(146): unsure at all Xaa locations
  Clone ID: uC-gsflnu33B003b06b1.pep
FFSKGMAEADHQILSAEIKLGSQYYFYMETQTTLAVPDEDDSMVVYSSIQCPQIAHETLAQCLGLPANNIRVITRRIGGGFGGKTIKAVSVAAACAVAAYKLQRPVRTYLNRKTDMKMAGGRHSMXVTFTVRFKESGKITGLKLRI

SEQ ID NO: 112907 - protein, 60 aa, Gossypium hirsutum
  Clone ID: uC-gsflnu33B003b10b1.pep
VWGAPGFSLFRHCLISAREFDLGAPVHESFCPSARGCMRVSSLIVPPSYFVFFSWGFRVF

SEQ ID NO: 112908 - protein, 82 aa, Gossypium hirsutum
  Clone ID: uC-gsflnu33B003b11b1.pep
CKKAFLLVIAVDCSLSFHEPLRCGCCFANICFDHLHLSGWDVAVMSLSHCSVVSPYSISSACSVRATSAKPPPWCSFFPNVW

SEQ ID NO: 112909 - protein, 41 aa, Gossypium hirsutum
  Clone ID: uC-gsflnu33B003b12b1.pep
VPLLGSVIPRRNRHFVLGLFVISRYPLSILPLLTAGHRTSG

SEQ ID NO: 112910 - protein, 57 aa, Gossypium hirsutum
  Clone ID: uC-gsflnu33B003c02b1.pep
ISDLIYVIQTRVLDMGMHLTEYIQLFKTFLYIWRAFKRLYPCNCVQNGVGVKCFKKN

SEQ ID NO: 112911 - protein, 36 aa, Gossypium hirsutum
  Clone ID: uC-gsflnu33B003c12b1.pep
PRVRINYELRGDFWNISTIIRRRSYKYIMDQIHMNK

SEQ ID NO: 112912 - protein, 52 aa, Gossypium hirsutum
  Clone ID: uC-gsflnu33B003e01b1.pep
HTSEQKKNIRSILGTYTSKPHGTTATIQGIKASSLEIMIQLSERLKNWNGNL

SEQ ID NO: 112913 - protein, 60 aa, Gossypium hirsutum
  Clone ID: uC-gsflnu33B003e10b1.pep
STRPTNRPPKGPFLDQSPPRPKPLMPLSNGSSSQGRPHAAEAYNRLNTSEENLSSHPQRT

SEQ ID NO: 112914 - protein, 40 aa, Gossypium hirsutum
  Clone ID: uC-gsflnu33B003e12b1.pep
HLSFLVRVNLVHWTLAFSPFGCGVSLLKKIPFLFAWSDAW

SEQ ID NO: 112915 - protein, 42 aa, Gossypium hirsutum
  Clone ID: uC-gsflnu33B003f02b1.pep
YSLIFSFHVLFHFLYTFNLYTPEYILFIEKLPYPIRKAGSMI

SEQ ID NO: 112916 - protein, 92 aa, Gossypium hirsutum
  Clone ID: uC-gsflnu33B003f06b1.pep
FDPRFNPGVRVSCYYGPQLPTAQSYNITLYVSTTVSVEPNNQDGDGVVLTSSGEYCKNWPNTKAYPVPKASHLGILQTTDILKAIVNAANLV

SEQ ID NO: 112917 - protein, 59 aa, Gossypium hirsutum
  Clone ID: uC-gsflnu33B003f10b1.pep
YLVHALEASPLTLFLRSSIRPPALLHAGSIHCNLELRYSVKVCSILNTIPCWSVCSDAW

SEQ ID NO: 112918 - protein, 56 aa, Gossypium hirsutum
  Clone ID: uC-gsflnu33B003f12b1.pep
FYISGFPLLRFDRCDLLFIYPTLDDLLHCTLALSPFVFGVSVLKTYPFLCAWSDAW

SEQ ID NO: 112919 - protein, 39 aa, Gossypium hirsutum
  Clone ID: uC-gsflnu33B003g01b1.pep
MYPYKYGDLYDTLILNLQLKTLTQYTFAISPSKFDAYEP

SEQ ID NO: 112920 - protein, 56 aa, Gossypium hirsutum
  Clone ID: uC-gsflnu33B003g02b1.pep
IFLECTHASLLTFVRIVTLFCTLKVYRIGPLQKPLLDAGDVHQKIPFPPFIYRTRE

SEQ ID NO: 112921 - protein, 47 aa, Gossypium hirsutum
  Clone ID: uC-gsflnu33B003g08b1.pep
SRTADSQAGSSPVLRLFALLGQPERNPLFRLRNREQLRMVCSHEKVV

SEQ ID NO: 112922 - protein, 55 aa, Gossypium hirsutum
  unsure (1)..(55): unsure at all Xaa locations
  Clone ID: uC-gsflnu33B003g10b1.pep
KGAYAPLRSAFVLEHITEFVKEAVRGGKGNLPLNGGLFIVXTDARDGKDGKITVE

SEQ ID NO: 112923 - protein, 53 aa, Gossypium hirsutum
  Clone ID: uC-gsflnu33B003h01b1.pep
GQFLDPTPCIQKMIGRIFLDSKFQGMEQGPEYKKGHKTWMGTFNNHPLRVRGC

SEQ ID NO: 112924 - protein, 59 aa, Gossypium hirsutum
  Clone ID: uC-gsflnu33B003h03b1.pep
PLVFVPLPVLILHHGLFSNPIQSFVVYSTPHSKYIIIECSHTSMVTYPIVFPLIFNLKL

SEQ ID NO: 112925 - protein, 47 aa, Gossypium hirsutum
  Clone ID: uC-gsflnu33B003h05b1.pep
RTTAKALAKVALIKQERKLGARIRSKTDPVSTINYPYPRSADVAFRT

SEQ ID NO: 112926 - protein, 61 aa, Gossypium hirsutum
  Clone ID: uC-gsflnu33B004a04b1.pep
SPSSIPGLAVPLPQPCWSRSSSSSHLKSRGPPALDHPESRVMHGLSVGLFPLMGLKSCDRS

SEQ ID NO: 112927 - protein, 72 aa, Gossypium hirsutum
  Clone ID: uC-gsflnu33B004a08b1.pep
SRVRSDVPKFKNRETHGQKLGHTGVPDGRVPQNLYKPLTIHHLPPQKSLTLVTSTPHALPATPLRRLQHYFR

SEQ ID NO: 112928 - protein, 41 aa, Gossypium hirsutum
  Clone ID: uC-gsflnu33B004a11b1.pep
FSLGCMIAGMIFPDGAHPAPNPPHILRHFGLLKALKTQGTC

SEQ ID NO: 112929 - protein, 160 aa, Gossypium hirsutum
  Clone ID: uC-gsflnu33B004b04b1.pep
YDDTDSDRTKGKKLDVGFSGTTKQWEDTFGKRYSKSGAMYRGNSPSPLAAIPCIPDILPKKIDATNEFPNIIKLPEMRIVEVLLEIVAVKNLPDEKKGNLFVLLSKTQPDVFCNTKQKLTILSESGKKQVLLFQCEPTGELHFELVSNSSSTLPGTETCK

SEQ ID NO: 112930 - protein, 131 aa, Gossypium hirsutum
  Clone ID: uC-gsflnu33B004b05b1.pep
GKKERKKNEKKGAKEPAKGTGKWGGTTTADGINGPKKGGAQLPIRKSKCWERPTGRAPSQKSQRGKGGRAARAIRWGTPGVYQAQGWKKKGSEMKLGAPKKKVNVASTRTEKLGTTKETARAQEEVIKHIY

SEQ ID NO: 112931 - protein, 144 aa, Gossypium hirsutum
  unsure (1)..(144): unsure at all Xaa locations
  Clone ID: uC-gsflnu33B004c02b1.pep
SSALLYLHEEWEQCVVHRDIKSSNVMLDSSFNVKLGDFGLAKLMDHELGPKTTGLAGTLGYLAPEYISTGRASKESDVYSFGVVLLEIATGRKSVDPGRKSDMGLVEXXXWGLYGTGELILAVDDKLGKEFDEIQVESLMIVGL

SEQ ID NO: 112932 - protein, 30 aa, Gossypium hirsutum
  Clone ID: uC-gsflnu33B004c04b1.pep
DTCPWGPQAPTAGRAIGRRARVSLLVRSLT

SEQ ID NO: 112933 - protein, 122 aa, Gossypium hirsutum
  Clone ID: uC-gsflnu33B004c05b1.pep
MGALDYISNFCTVSRRRTKRKPMQTVEIKVKMDCDGCERRVKNAVTNMKGVKSVEVNRKQSRVTVTGNVEPNRVLKRVKSTGKRAEFWPYIPQHVVYYPYASGAYDKKAPAGFVRTCFSLSV

SEQ ID NO: 112934 - protein, 146 aa, Gossypium hirsutum
  unsure (1)..(146): unsure at all Xaa locations
  Clone ID: uC-gsflnu33B004c06b1.pep
GKIKGKKPPKERNTKHDSNCCKEGKLYDIYKCSPQVSNHTKATQTLNVRFDDGEDGRGPPECDNKYHSNKELVVTFSTGWFNXGKKRCLKYINIHGNGQTVKAKVVNECDSTMGCDGGHSYQPPCVNNIIDASDTVWEALGVPGRV

SEQ ID NO: 112935 - protein, 139 aa, Gossypium hirsutum
  unsure (1)..(139): unsure at all Xaa locations
  Clone ID: uC-gsflnu33B004e03b1.pep
MTKRGMGGSAGNKFRMSVGIPXADTVNCADNTGAKNLYIICVKGIKGRVNMLPSACVADMDMVTVKKGKPDSWKKVLDRRIIRQHILWRTXDGGYMDFEDNAGVIVNPKGEMKGSVITGSIAKECADLRPKIASADNAI

SEQ ID NO: 112936 - protein, 64 aa, Gossypium hirsutum
  Clone ID: uC-gsflnu33B004e10b1.pep
LCIANGGSTKGIRRESKISLMPCCLSCPKTLHSTTDADVTTSAYLLYSCLGCLPLHTLSHFSWA

SEQ ID NO: 112937 - protein, 78 aa, Gossypium hirsutum
  Clone ID: uC-gsflnu33B004g01b1.pep
KISVSSANITMKIEANLNKLKLIHQVLPLQGRGFHGICKAGFQNRHRVIAVVHTGGDRHMHQWLEHLKLGSSVRVADV

SEQ ID NO: 112938 - protein, 98 aa, Gossypium hirsutum
  unsure (1)..(98): unsure at all Xaa locations
  Clone ID: uC-gsflnu33B004g02b1.pep
KSASEQRPRPMQRHRRGNIPMGTSRRSTKPGLTVNAKIVQEAPETAQECRLALISYTTSXGSDKCLTENRETKDWDDFMSAIATKGTVDDNEASKIYL

SEQ ID NO: 112939 - protein, 91 aa, Gossypium hirsutum
  unsure (1)..(91): unsure at all Xaa locations
  Clone ID: uC-gsflnu33B004g03b1.pep
IGEPKGFPSPPFLKPGPGILFLGPQKKNFYLPTPGRKLGTPKKGPPLFFFFFFFFFFFFFFFFFFFFFFFFFFFFFFFFFFFFFFFXPTFL

SEQ ID NO: 112940 - protein, 152 aa, Gossypium hirsutum
  unsure (1)..(152): unsure at all Xaa locations
  Clone ID: uC-gsflnu33B004g04b1.pep
MENLAILLLVIFLVAMPMAYCVKEGAEEVDEWFDKLPYAKQKVTKLHFFFHDRFAGKHNRTAVRVAHGPETDKSPTSCGLVFIMDDPLTERMNPTSKELGRAQGLYAFSGQDELSLLMSFTWCLXTGEFNGSTVTVLGRNPRDXHREMPIEV

SEQ ID NO: 112941 - protein, 164 aa, Gossypium hirsutum
  unsure (1)..(164): unsure at all Xaa locations
  Clone ID: uC-gsflnu33B004h06b1.pep
SLYEVLNVAKTASQQEIKKAYYKLALRLHPDKNPGDEEAKEKFQQLQKVISILGDEEKRAVYDQTGCVDDADLAXDVVENLKTFFRAMYKKVTEADIEEFEVNYRGSDSEKKDLFDLYKEVQGQYEXFFCSMLCSDPKLDSHRFKDLLDEAIAAGELKETKAYR

SEQ ID NO: 112942 - protein, 78 aa, Gossypium hirsutum
  Clone ID: uC-gsflnu33B004h07b1.pep
FQLLSSHQPRLLISRSSLQRELYVKCSCFTSLFGCSSSPRLSSACISVARVGGQSVATSTATAVAAASVPRFIPMVWA

SEQ ID NO: 112943 - protein, 50 aa, Gossypium hirsutum
  Clone ID: uC-gsflnu33B004h11b1.pep
PITSERNFSLGSSITRVFIRVECRRTAYNMLSGSRGEMPSLQQCGRRQGS

SEQ ID NO: 112944 - protein, 76 aa, Gossypium hirsutum
  unsure (1)..(76): unsure at all Xaa locations
  Clone ID: uC-gsflnu33B005a06b1.pep
IESMSGNVLVYRQYETTTTIASEGILAASAKLVDAGKHHTYAETENARXLYNPMKAIYSFVGANNQSNILEDLETL

SEQ ID NO: 112945 - protein, 147 aa, Gossypium hirsutum
  Clone ID: uC-gsflnu33B005b08b1.pep
YASAHASAHASVGCCGATWNPRPRISTISILDEDEETPQSQQVITRTTTRFNVVNSATVPLLLARHHHQQQQAVPTPPTSASGMNLAMALAAERNLRGNNDNTNNVGPRPVQVKTLMRLIEETEGEDCWTQHEEQLNKKQRKEAVEN

SEQ ID NO: 112946 - protein, 78 aa, Gossypium hirsutum
  Clone ID: uC-gsflnu33B005c07b1.pep
MAVRPSPQTETSGRRLRSALLDETNIPNLKKNRVNLLSMVAGGSDDRRLLNQKLSLEHLQPKNSLLTSVNPLPPLHEQ

SEQ ID NO: 112947 - protein, 134 aa, Gossypium hirsutum
  Clone ID: uC-gsflnu33B005d08b1.pep
SHASDLRLSNNKLVGSIPAGLFDLGLEDMDLSDNRLNGSIPRGSSSLFESLRNLDLSRNNLEGTIPAEMGLFANLRYLNLSWNKLESSIPPELGLFPNLTVLDLRNNALSGDVAGDICESGSLVILQLDGNSLT

SEQ ID NO: 112948 - protein, 116 aa, Gossypium hirsutum
  unsure (1)..(116): unsure at all Xaa locations
  Clone ID: uC-gsflnu33B005e02b1.pep
MAKTSLSRLFASLSEHSIAKPSFTGSRSESVTRSAYNSVTRFVCSSAQETQLIREERSNEGDREAAKENLESVNKEEDEGEDGDHVNKETGEXXGPKGPEPTRYGDWERNGRCSDF

SEQ ID NO: 112949 - protein, 101 aa, Gossypium hirsutum
  Clone ID: uC-gsflnu33B005e03b1.pep
FSAATECGCLGGAGEAGLPLLFIMALIVLGLFTVIGIFYSVLVATMVGQRIWQRHYHILAKRMLTKEYVVEDVDGEMNGSDWSPPPLPPDHIQQLKTLGLL

SEQ ID NO: 112950 - protein, 51 aa, Gossypium hirsutum
  Clone ID: uC-gsflnu33B005e07b1.pep
RSFGCNFSLLLSWVTYVSPLNAFYYAVQVEKFFLNVSELFFLKKKKKNKHL

SEQ ID NO: 112951 - protein, 114 aa, Gossypium hirsutum
  Clone ID: uC-gsflnu33B005g03b1.pep
MANNLGNLILRAARLYSLTFSDQSMSFLMQVPLYVATKMASIKRSSFFVPSTDGYARAAMQWIGYEPHCTPYWPHSILWGLAYSLPESVADAWRLRSCLGIRKRGQMKDSRKKE

SEQ ID NO: 112952 - protein, 57 aa, Gossypium hirsutum
  Clone ID: uC-gsflnu33B005g05b1.pep
LTFIVQLCRMSGINSHPCLIMVIFDAGSTANGLSIRSTCVLHTAQQALHMSELIAMS

SEQ ID NO: 112953 - protein, 73 aa, Gossypium hirsutum
  Clone ID: uC-gsflnu33B005g06b1.pep
AYPSGPIRHLKWTVGSPFTLQVNRVLESRPSKYGAHGSVCGGRFVQPSRSMAVSGHLPQSDQSKLKTPLLHER

SEQ ID NO: 112954 - protein, 49 aa, Gossypium hirsutum
  Clone ID: uC-gsflnu33B005g12b1.pep
TSHIYTLPLPFQITLTFITTTIVTLLCNFFFLKITVVLTSWTRVNRTRE

SEQ ID NO: 112955 - protein, 89 aa, Gossypium hirsutum
  Clone ID: uC-gsflnu33B005h06b1.pep
FTRTDKVAILYLKKSGPDLTKVLTQVYVGIAGTGVAAAFSVTQKAAYVRAQLCTSISTALALASGSFGSPGQVTDCGTLLYVLAGLLTG

SEQ ID NO: 112956 - protein, 67 aa, Gossypium hirsutum
  Clone ID: uC-gsflnu33B005h07b1.pep
SCSLFFMTRSTPSTFTFDSKIEKTARANRKETKLCKKQLRVVGTQNNPPPEIGINNEVKSRVNENPT

SEQ ID NO: 112957 - protein, 104 aa, Gossypium hirsutum
  Clone ID: uC-gsflnu33B005h08b1.pep
DDPAKEAAKFTAQDIIMNHTGQIGNGYARVLCCHTSHIADKFAELLTKIDRRSGQELEKEPKLLKNGDAGMIQMIPTKPMVVETFSVYPPLGRFAVRDMHQTEA

SEQ ID NO: 112958 - protein, 64 aa, Gossypium hirsutum
  Clone ID: uC-gsflnu33B005h12b1.pep
MPAVGGIGPGTGKEYPGNLTLYVLVTCIVAAMGGLIFGCDIGISCGVTTMTPFLLNSFPCVWMK

SEQ ID NO: 112959 - protein, 44 aa, Gossypium hirsutum
  Clone ID: uC-gsflnu33B006b06b1.pep
GYKIWLFIYVILIGSSKSKSEKVNSVKKYARVDARVVGRVDVRV

SEQ ID NO: 112960 - protein, 76 aa, Gossypium hirsutum
  Clone ID: uC-gsflnu33B006b07b1.pep
PVKTGLWESIKSVVLLGEAVKSQHIEGRGAVSARITSLRSDPSCMGHVESRVNQQGPPCKAKYSCVTDSEVVVPKF

SEQ ID NO: 112961 - protein, 156 aa, Gossypium hirsutum
  unsure (1)..(156): unsure at all Xaa locations
  Clone ID: uC-gsflnu33B006b12b1.pep
LAVRVSECGLAPLLSSGSTSEFSGSLFVSYGYAAPEIEFGSYTCQSDVYSXGVVMLELLTGRESFDRSRPLGEQFLVRWAIQQLHDIDALVRMVDITLNGVYPVKSLSRFADIISRCEQSLPPIRPSISEIVQDRIHMIKRWILYSYRLYIEEWMI

SEQ ID NO: 112962 - protein, 41 aa, Gossypium hirsutum
  Clone ID: uC-gsflnu33B006e01b1.pep
NNINCHSINLVKYSSLTNHPCKAGKPPLMINRNTKSMLLRI

SEQ ID NO: 112963 - protein, 99 aa, Gossypium hirsutum
  Clone ID: uC-gsflnu33B006e05b1.pep
FDEDNYVSSLSFIPDSTTSGTELFAENSTSSGTSDMFFTKLSSATVSTAELLSTFLSVLFSAAVRTSSDKTVADLSSVLYESASEPRLQVSSFDFFSKA

SEQ ID NO: 112964 - protein, 57 aa, Gossypium hirsutum
  Clone ID: uC-gsflnu33B006e11b1.pep
QSRKFAISPWQSFHADAQRTTADVAMINLNKVSPNKSSPHTHCHLSTFHIKHTVIRK

SEQ ID NO: 112965 - protein, 68 aa, Gossypium hirsutum
  Clone ID: uC-gsflnu33B006g11b1.pep
PAVVPDPCSGQLVYAVECVKVDASQVDFLGEPQGSPVPVDVYPVPVKFLEVASYAELVVVCQETLSCP

SEQ ID NO: 112966 - protein, 58 aa, Gossypium hirsutum
  Clone ID: uC-gsflnu33B006h05b1.pep
AKGGKNPEWNHVFEFDLESLPPEESDHLFLKFDLRADGLVNRTIGEVRVPLKALIDDF

SEQ ID NO: 112967 - protein, 105 aa, Gossypium hirsutum
  Clone ID: uC-gsflnu33B006h08b1.pep
EPKVIESSTCGLDCGTNPKKDFFITKFLLLTSDEGTTKRILSIPISVANTNHMVVCKYDGFAEYTVNCAYPVPSLVMFHTRPWSSSNTHGYRDFYKSSARVDERV

SEQ ID NO: 112968 - protein, 125 aa, Gossypium hirsutum
  Clone ID: uC-gsflnu33B006h11b1.pep
VLREGAVLVCTRCARGRPAGFNSRPRPPIFVTSDSPNALRSHVMEIANGSDVVETLAHFARRRHRGVSVLSGSGTVTNVTCQTALSSCCNDGSYGRFEILILTVAFVTGPAFTGSIGLTIYLAVG

SEQ ID NO: 112969 - protein, 120 aa, Gossypium hirsutum
  Clone ID: uC-gsflnu33B008b07b1.pep
MIQKGIKEIPELFIIGNPDMTIVAFGSAVLDIFEVNDIMSGKGWHLNALQRPNSIHICVTLQHVPVVDAFLQDLREAVQTVKENPGPISGGLAPIYGAAGRMPDRGMAQDLLVNYMDGSC

SEQ ID NO: 112970 - protein, 90 aa, Gossypium hirsutum
  Clone ID: uC-gsflnu33B008c02b1.pep
MPRLDLIQDWQLAYVEGLKKAGQEVKLLYMEQATIGFLLLPNSNHFHTVTDEITKFVSSDCIKTIGERIMQCIGALLCVDYVCLFKCFLG

SEQ ID NO: 112971 - protein, 167 aa, Gossypium hirsutum
  unsure (1)..(167): unsure at all Xaa locations
  Clone ID: uC-gsflnu33B008c12b1.pep
LSFVREFFQGIDYELEEGAARYFVNVLLNYLVLMGQINRARCVWKVAYENKLFPKAIVFDQHIAWSLDVRNLSVGAALIAVVHTLHRFRKRMLYYGVVPRRIKLVTGPTLKIVVAQMLSSVESPFEVSKVVLRATGDSVMXWFKKPIVQQFLLNEIPSRADILMHKL

SEQ ID NO: 112972 - protein, 97 aa, Gossypium hirsutum
  unsure (1)..(97): unsure at all Xaa locations
  Clone ID: uC-gsflnu33B008d11b1.pep
MEEITQGVNNINLAADSHKKNRIQVSNTKKPLFFYVNLAKRYMQQYNEVEXLSALDMAIATVCTIVEILKNHGLAVVKNISTPTCCMMEDFSGFLGP

SEQ ID NO: 112973 - protein, 124 aa, Gossypium hirsutum
  Clone ID: uC-gsflnu33B008e04b1.pep
MRVPVSSPQSNHCQSPKPNNNSNTSSTRNISFHGATINSVSTSCYEPTSVLELRRSPSPGHDNPVDHHQHQQQQQQHQAPLEWDEHVLRNMDCDSIMKDLGLDDELVPVIKTFSPQENHIQNLP

SEQ ID NO: 112974 - protein, 167 aa, Gossypium hirsutum
  Clone ID: uC-gsflnu33B008e11b1.pep
FVSSLQSSSQIQSPASTQAVSLSPLTPSTPITPMSLHQQQKNHLVPRGLGRSSRPGASGLNNQIGQQQQRQLQQQQFQQSGRHHPQQRQQTQSQQQAKLLKGAGRGNMQVHQNLSVDPSPLNGLSMASSNQAAEKGEQMMHLMQGQGLYSGSVMSPVQPSKPSVSSQ

SEQ ID NO: 112975 - protein, 103 aa, Gossypium hirsutum
  Clone ID: uC-gsflnu33B008g11b1.pep
KEANDEKLSAVEATDEDRKGDKTANADYKDKRTEDDYSTVEGASLEFIPPDLKWPDMPSQDSLALDYLLLQAALVLPKRMALQVLVVLAFHKGTLIPIQHIGD

SEQ ID NO: 112976 - protein, 106 aa, Gossypium hirsutum
  Clone ID: uC-gsflnu33B008g12b1.pep
STRPPTRPRFLLLYNRYLYDILTKASVVKKKIPVLICCNKSDKVTAHTKVFIRKQIEKEIEKLRASRSAISAADISNDFTLGVSGEVFLFTQCSNADTVAYAPGLN

SEQ ID NO: 112977 - protein, 108 aa, Gossypium hirsutum
  unsure (1)..(108): unsure at all Xaa locations
  Clone ID: uC-gsflnu33B008h05b1.pep
PSERLTAHEVLCHPWICENGVAPDKALDPAVLSRLKQFSAMNKLKKMALRVIAESLSEEEIAGLREMFTAMDTDNSGAITFDELKAGLRSYGSTLXDTDIRYLMDAVY

SEQ ID NO: 112978 - protein, 68 aa, Gossypium hirsutum
  Clone ID: uC-gsflnu33B008h07b1.pep
EEYAKKLKPLVENSKPRKRKENRGYHCKCFLFLFFFGSEICKILFVVNFIRKQILLSLPPLSLSLLSS

SEQ ID NO: 112979 - protein, 110 aa, Gossypium hirsutum
  unsure (1)..(110): unsure at all Xaa locations
  Clone ID: uC-gsflnu33B009a06b1.pep
LFFLICNCKGCECSYSHICSRFQQARLPIQAHSQKLQLIPGRCQXALRRQGWSTRLMVYATSTSINLQGVQSVQTSRQAACQQALQAWRPQIXQVIQPAGRSSFILPPST

SEQ ID NO: 112980 - protein, 54 aa, Gossypium hirsutum
  Clone ID: uC-gsflnu33B009b08b1.pep
VLKTILLSEIKPFTILTFFHWLVIKVNNTLSLQKIGKYVSTLMNKSCFFYYIQR

SEQ ID NO: 112981 - protein, 164 aa, Gossypium hirsutum
  Clone ID: uC-gsflnu33B009b12b1.pep
SQVRMVEDDLMYNTFLEVYENHCARNDREPDLPITYFKEQLNQAISGQISPEAVVDLRLQAYNDITKSLVADGIFSQYMYKTLPSGNHMWAFKKQFAIQLALSSFMSFMLQIGGRSPNKILFAKNTGKIFQTDFHPAYDVNGMIEFSEPVPFRLTRNMQAFFSH

SEQ ID NO: 112982 - protein, 68 aa, Gossypium hirsutum
  Clone ID: uC-gsflnu33B009c10b1.pep
SSVVFFSYISMLFRNEIFASDLFYILMLISYVPCLDLIKIFCNKLFSYFKKIKCIILLMKLLHHRINR

SEQ ID NO: 112983 - protein, 93 aa, Gossypium hirsutum
  Clone ID: uC-gsflnu33B009d11b1.pep
MWPQKKKNNSPPPGGKNGCSKKAAPPFFFFFFFFFFFFFFFFFFFFFFFFFFFFFFHDGSSSAADVIIIFSTIVVFSYDHNSTPPVVNLNFPP

SEQ ID NO: 112984 - protein, 158 aa, Gossypium hirsutum
  unsure (1)..(158): unsure at all Xaa locations
  Clone ID: uC-gsflnu33B009e01b1.pep
PRVRPRVRPRVRGRVGASSFSRFSQTLLLLVVFWGITSSSNAQLSTDYYSESCPNLLSTVKFTVHSAIMKEARMGASLLRLFFHDCFVIGCDXGSLLLDDTSSFTGEKNAVPNRNSXRGFNVIDDIKSAAESVCPVVVSCADVPCIAARTLLHSGRTR

SEQ ID NO: 112985 - protein, 108 aa, Gossypium hirsutum
  unsure (1)..(108): unsure at all Xaa locations
  Clone ID: uC-gsflnu33B009e03b1.pep
NRIIQKEHAERKFTFKSIDLFHFFIXNPFTNVSSFETLSETFPTSETSXRKLVIVFGTKFGLKSKLSSGGTKPIFDPSLFSLKSFPFSFLCFFFPFFFLLKMIKMADA

SEQ ID NO: 112986 - protein, 57 aa, Gossypium hirsutum
  Clone ID: uC-gsflnu33B009e08b1.pep
SETFSTSETSHRKLVIVFGTKFALSCKLRSGGTKPNFDPSHGVIKQPPFCPARIHSQ

SEQ ID NO: 112987 - protein, 33 aa, Gossypium hirsutum
  Clone ID: uC-gsflnu33B009f08b1.pep
IETNKIQQNEMKTGNSHIITSAIDVATLKPANS

SEQ ID NO: 112988 - protein, 144 aa, Gossypium hirsutum
  unsure (1)..(144): unsure at all Xaa locations
  Clone ID: uC-gsflnu33B009f12b1.pep
MTKDKKIGVAVDYSKGSKAALKWSIDNLLNQGDTLYLIHVKPHQSDESRNLLWSTTGSPLIPLSEFREEEVMKHMQVEXDPVILNLGLXIASRQKQGTLVAKITXGDARDKICASAEDLKLDCLVMGSRGLGTIQRVLIGSVSN

SEQ ID NO: 112989 - protein, 123 aa, Gossypium hirsutum
  Clone ID: uC-gsflnu33B009h09b1.pep
LFWFCSSELFAELTDRIVPVAINTKQTVFHGTTVRGHKLLDPYFVFMNPMPTYEITFLNQLPTELTCKGGKSAIEVANYIQRVLAGTLGFECTNLTRKDKYAMLAGTDGRVPSKKEKEKALVL

SEQ ID NO: 112990 - protein, 133 aa, Gossypium hirsutum
  unsure (1)..(133): unsure at all Xaa locations
  Clone ID: uC-gsflnu33B009h11b1.pep
MRAIPGSPGTLTSLFLRIMQCVFAAGSIASMSTTSNFFNFTAFCYLIASMGLQVVWSFALAILDGIALVKKKVLHNPVLVXLYVVGDWVNHFSNLQTLLIFFTANENSTFIKFYTGDGVVCLWLPHLPRAALP

SEQ ID NO: 112991 - protein, 102 aa, Gossypium hirsutum
  Clone ID: uC-gsflnu33B011a10b1.pep
ARLGPSGRQDRPIMSWEVILLLTGLMLSLEKAEIPSVGGRTKSYSILCTECDNRTGVSCTLKQSLNAVETKINAPSSEESKSNHGMRSKTHWLFLSCQFTTS

SEQ ID NO: 112992 - protein, 130 aa, Gossypium hirsutum
  Clone ID: uC-gsflnu33B011b05b1.pep
MGYDWGHKKPKSKAVIPKKARSDNPYLRLLIKLYKYLHTRVPCGFNKVILKRLHHSRSNKIPISLQTLIKKMDKKTDKVAVIVGSITDDIRVQEVPALKVCALHFTEAARARIIKAGGQIYTFDQLAIQR

SEQ ID NO: 112993 - protein, 67 aa, Gossypium hirsutum
  Clone ID: uC-gsflnu33B011c01b1.pep
LAPKKHPDPTFNLIIFHPSISMTKAREAIFLLIKLNKNNTKKNWYICRFLSPKTQPYSLVGLAINTS

SEQ ID NO: 112994 - protein, 137 aa, Gossypium hirsutum
  unsure (1)..(137): unsure at all Xaa locations
  Clone ID: uC-gsflnu33B011d04b1.pep
FHSCGSIELQKTGTGSFIDEKGFRSAVYMIDIGQNDLLMALYASNLTYEPVSKQIPSFLAEIKLAIQNIYSYGGRKFWIHNTGPLGCAPKELALHPHNXSDLDRIGCFRVHYDLAKAFNRGLRNICKEMRTILKDAT

SEQ ID NO: 112995 - protein, 163 aa, Gossypium hirsutum
  Clone ID: uC-gsflnu33B011e01b1.pep
SRVRPRVRWQVYNTLGGSHGIPRVHYKGRQGDYYVMVMDMLGPSLWDVWNNNSHTMSIEMVACIAIEAISILEKMHSRGYVHGDVKPENFLLGPTGTPDEKKLFLADLGLATRWRDSSTGLHVEYDQRPDVLRGTVRYASVHAHLGRTCSRRDDLESLAYTLI

SEQ ID NO: 112996 - protein, 115 aa, Gossypium hirsutum
  Clone ID: uC-gsflnu33B011e06b1.pep
IRAILSGLLLLCIAVALFVYCTICSVICSIFWYLKHPSKENKKTLRLSFFPPWRFEHLLSTRGSTHLLQVPRVYSLTIKTWRRESDKRGFLLFLLRLNFWLLSPMNRRFLFVLSS

SEQ ID NO: 112997 - protein, 151 aa, Gossypium hirsutum
  Clone ID: uC-gsflnu33B011e09b1.pep
MNGTWDSLYPEWIDEEQEEKVPVCPSLPKIEVPGIRLDLVAVKLPCRNEGNWPRDVARLHLQLAAASLATSAKGFYPMHVLFISKCFPIPNMFTCKELVARENNVWLYKPDLNVLREKLQFPPGSCELALPFEVKGQFIFLKQMPHPPARI

SEQ ID NO: 112998 - protein, 46 aa, Gossypium hirsutum
  Clone ID: uC-gsflnu33B011f01b1.pep
NFQRDDKELQVSKNMKRLLLKFPNQNSMVNYNNMAASTIMAFSGRV

SEQ ID NO: 112999 - protein, 86 aa, Gossypium hirsutum
  Clone ID: uC-gsflnu33B011g09b1.pep
VTLDLSSNDLHGSVPHELSNRAYLNNLILSNNRLSGSIPYQLSGLDRLKRFSVANNDLSGAIPSSFENRDKADSSGNSGLCGDPLG

SEQ ID NO: 113000 - protein, 150 aa, Gossypium hirsutum
  Clone ID: uC-gsflnu33B011g12b1.pep
HASGTPYGRRFISQELNSYLEYLFKLIVERGPDVGLKVSLNRYDLFHGHLFIATETGRLGILFHAKEYPLYDKQVFPYYLGYCQKDSNVTYDDSINLRNILWLAPLPSNSTQGWIAPGVLLVLDAHPGGIVYRDLIPEYVNAVRTIYEDD

SEQ ID NO: 113001 - protein, 53 aa, Gossypium hirsutum
  Clone ID: uC-gsflnu33B011h03b1.pep
IHFQIPRIYQPKTSFGFLKFLFRLSRRRKLHRGEAIVKVSSPSDSGDGRWGYS

SEQ ID NO: 113002 - protein, 148 aa, Gossypium hirsutum
  Clone ID: uC-gsflnu33B011h09b1.pep
SSTYYPPSSQQPLSSSAIVGPTEKVLSSSPDTPLSFCPSEPDEKPQPQPQPPKKKTSVNTLKRKKEQILEMVKDFTHRNELLKKDIEIKRQLLDQQIAENLELKSKKQKLNQSLLTPVTNKRLDLGVQSAQVSIGQYHHYQHQHPTRS

SEQ ID NO: 113003 - protein, 104 aa, Gossypium hirsutum
  unsure (1)..(104): unsure at all Xaa locations
  Clone ID: uC-gsflnu33B012a05b1.pep
ERRRRYSFYCYCIGSSLFLLFSFFVYLAYFFGPGAAGSGCQSGRVGSACPNCIECFIFFFLFVLPSFFFFLSFFQIISFTSFLSVPIRPPNNVSLSGGASSXPG

SEQ ID NO: 113004 - protein, 62 aa, Gossypium hirsutum
  Clone ID: uC-gsflnu33B012a06b1.pep
FHASAHASRHTIVKRLGAIWAVGFSKHLPKRAEGRGFASLNVDWQMRIYIAMHYYCLKKNRL

SEQ ID NO: 113005 - protein, 25 aa, Gossypium hirsutum
  Clone ID: uC-gsflnu33B012a10b1.pep
SIYVQQSVVVSKLSNALQVAFAVAW

SEQ ID NO: 113006 - protein, 84 aa, Gossypium hirsutum
  Clone ID: uC-gsflnu33B012b01b1.pep
GLVRGRGLTDKLLQQLSAVMHHQPYIQQIALSLSILCMSAVGKFHRADSNSSRSCAPAGALPSMLSSFSLHAHLPAKCKDFGVA

SEQ ID NO: 113007 - protein, 38 aa, Gossypium hirsutum
  Clone ID: uC-gsflnu33B012b06b1.pep
PVVSRVRACGENGSLVFSVLYAIQGAYAFICVQMNICK

SEQ ID NO: 113008 - protein, 84 aa, Gossypium hirsutum
  Clone ID: uC-gsflnu33B012b11b1.pep
SHTPVRFTTSSPYNHVLNNGSAYALYQESPPAAMRMSCNTSMLSWSKFISVIIVRGSVASSTIIYVQAFYMCSDTPSHKLAYNL

SEQ ID NO: 113009 - protein, 64 aa, Gossypium hirsutum
  Clone ID: uC-gsflnu33B012c03b1.pep
GNHRLTQLAHRNRPCRQACDTIISVPKEDHTLKCLYVKHIIKHRCYHSDQQQVWLDRHKFRVRV

SEQ ID NO: 113010 - protein, 49 aa, Gossypium hirsutum
  Clone ID: uC-gsflnu33B012c11b1.pep
KLDRAKHACIAAPVHRTRGGLLVNVVKGTVVQDMVLGTASCELSNSVAS

SEQ ID NO: 113011 - protein, 63 aa, Gossypium hirsutum
  Clone ID: uC-gsflnu33B012d06b1.pep
PLFVLPHKTDAKSHVYIFDISKSLVFVFSRPNWRSSGITWCTLDNIYMPNSTDRLITNCWQEI

SEQ ID NO: 113012 - protein, 79 aa, Gossypium hirsutum
  Clone ID: uC-gsflnu33B012e05b1.pep
HHIIVLDVQSKSTCEKMAYYQTLAFAALLLILLPAAVTGDLGDLSADLSPFYDRWWDDEECVRSSVMSAPLNRLNNLCV

SEQ ID NO: 113013 - protein, 137 aa, Gossypium hirsutum
  Clone ID: uC-gsflnu33B012e08b1.pep
VDLNMLLKRGKIVSAKAIANLPMFHRHQVSSSAAAPAQEYEFSCSNTPNYIFPFNLPTKKKNSINNYYHHLFACTHAPPTHDDDTAAMNAFKVVLEMLNNNMGVESDAAVIAASPMLPGFGQTPLVRQLRITDSSFP

SEQ ID NO: 113014 - protein, 63 aa, Gossypium hirsutum
  Clone ID: uC-gsflnu33B012f03b1.pep
IGAIYYKFLHANTKGINQNKNCVYNHTLRAHECHFSFCSDPYGPSDLDHYDRTHGRTRGRTRG

SEQ ID NO: 113015 - protein, 101 aa, Gossypium hirsutum
  Clone ID: uC-gsflnu33B012g05b1.pep
FDVSSMEMWWLINIRATLIALIFISIFYFSKKIYVKFLTISTSPSSSSSLLSSTLHLPSASSPISNQDSQSRTLEVVSDSDLKFLIDNLDEKRNEDQNWEN

SEQ ID NO: 113016 - protein, 89 aa, Gossypium hirsutum
  unsure (1)..(89): unsure at all Xaa locations
  Clone ID: uC-gsflnu33B012h06b1.pep
EKKKKKKKKTTQENQVSANASVSQSGDKDTSTLKSEEKQTAGKSSQVRTFPNGLDVQELAMGKPDGKRASCGSRLVXYLGKLXKNGKIF

SEQ ID NO: 113017 - protein, 96 aa, Gossypium hirsutum
  unsure (1)..(96): unsure at all Xaa locations
  Clone ID: uC-gsflnu33B013a12b1.pep
SESQAPVALHLGSILATEKVRWNCRYYIKHGAWRPGDGWSRMQTRPTISTGVLLYKMCQCLVMSTSGEDAQGPSIXPQRNQDDFEDLYRDMLPALS

SEQ ID NO: 113018 - protein, 53 aa, Gossypium hirsutum
  Clone ID: uC-gsflnu33B013b07b1.pep
LASIYLSHIGRISECLNTTGCQVLEYAHSKICTFTIMPAITRLDVVGISSNIA

SEQ ID NO: 113019 - protein, 51 aa, Gossypium hirsutum
  Clone ID: uC-gsflnu33B013b08b1.pep
GIHNRVPQYWIFSIRYHEHTDRPVHRNMAQNCLFRVHILENHKKHTLNPNA

SEQ ID NO: 113020 - protein, 155 aa, Gossypium hirsutum
  Clone ID: uC-gsflnu33B013b10b1.pep
LHAYASVEPLKVQNWMLAEMPGLITDFVICLDDRVLYFDNWLHGDVRQYNIEDPKNADLAGQVRVGGLVQKGSPIVAGTADGQTWQANDPEIQERSLRGGPQMIQVSLDGKRLYVTNSLFSTWDRQLYPELMEKGSHMLHIDVDTEKGGLKINPN

SEQ ID NO: 113021 - protein, 165 aa, Gossypium hirsutum
  Clone ID: uC-gsflnu33B013b11b1.pep
FFTRPLLSDGQDTYTVTGAGANKSQPNYQLLVPLSMHGSDNTGFQIPVHAFGFGADHDASSMHSISEISGGTFSFIETEAVLQDAFAQCIGGLLSVVVQELQVGVECMNPSLCLGPLKAGSYPSRVAADGKTGVIEVGDLYADEERDFLVSVKVPAESSECETSL

SEQ ID NO: 113022 - protein, 151 aa, Gossypium hirsutum
  Clone ID: uC-gsflnu33B013c01b1.pep
FLPQYLHKDIKDILSRMLTVDPKQRIRMHEIREHNFFKSKRWTKLPPILSVEEQLRTTIPISLDEDVDADIVKSLVSLGWGSEQEVREALLSGDCNYETVFYRQLEERKRFPYHSSPRKAKVKTRGRTNTLTTLSSSAPIPFEIPSAFARC

SEQ ID NO: 113023 - protein, 35 aa, Gossypium hirsutum
  Clone ID: uC-gsflnu33B013c05b1.pep
SRHDGRVRVNHIRKPHQYLVSSQRKNNLMDAAPDV

SEQ ID NO: 113024 - protein, 74 aa, Gossypium hirsutum
  Clone ID: uC-gsflnu33B013c12b1.pep
TVKPHKKKEKKKESSLVILVSTTNEKINASNLVYRAFISTKDLAYKTVRKQWSTRLAKHPQLPVKRHHTTTSKR

SEQ ID NO: 113025 - protein, 103 aa, Gossypium hirsutum
  unsure (1)..(103): unsure at all Xaa locations
  Clone ID: uC-gsflnu33B013d04b1.pep
LFTLRSGNEVHPHQLRDQSSSAXLQACMSHEPKSMATCATCAKTNMGMAFGEITTNAPVDYHTICRDTCRVAGSTSATLTCDAYAYIRTASCCLPLAWTHTLP

SEQ ID NO: 113026 - protein, 38 aa, Gossypium hirsutum
  Clone ID: uC-gsflnu33B013d09b1.pep
IIIYKMDSSIGSAHLIDGMKAANSNGHIMQKEFPFCNL

SEQ ID NO: 113027 - protein, 35 aa, Gossypium hirsutum
  Clone ID: uC-gsflnu33B013e04b1.pep
HVDRAGRPTRIKKCVGYLVCRHRTKYLVILALGRI

SEQ ID NO: 113028 - protein, 46 aa, Gossypium hirsutum
  Clone ID: uC-gsflnu33B013e08b1.pep
MYASHRLGVTAFSLWLQLILMFPKILCFGPFACISTSQRPGARTRG

SEQ ID NO: 113029 - protein, 60 aa, Gossypium hirsutum
  Clone ID: uC-gsflnu33B013e09b1.pep
PRVHSYGNCEAIIQIKDPVHKIPSQLKKTLSVRKNSVTTTEHPELPHNILDLVRIEDLDY

SEQ ID NO: 113030 - protein, 94 aa, Gossypium hirsutum
  unsure (1)..(94): unsure at all Xaa locations
  Clone ID: uC-gsflnu33B013f03b1.pep
KTNTSHSSVEKLRASKTAAPRCCHKLLHHVHNRLCHYFYFIIYNPNTYYASASINNPETEQQLSLRTFSKITNKTSQKGTKPNIKPKDNXTHEA

SEQ ID NO: 113031 - protein, 56 aa, Gossypium hirsutum
  Clone ID: uC-gsflnu33B013f07b1.pep
PRVRSPVHCEVFTQEKGQKREYVIDKRNTYGHEKHAITPTKVLEHPDNSFDALHSD

SEQ ID NO: 113032 - protein, 120 aa, Gossypium hirsutum
  unsure (1)..(120): unsure at all Xaa locations
  Clone ID: uC-gsflnu33B013f09b1.pep
SYWSQVRGAELGHMLRAMRNSSRKGEPEVAPEMLTDAMANMSXQVILIKLVYLTKGTRDXNKIQGHRWRQLMTTCRALKYKRSLYLDIACMDLPGIDCETCKXHNRWYVLLTMMMREHEE

SEQ ID NO: 113033 - protein, 31 aa, Gossypium hirsutum
  Clone ID: uC-gsflnu33B013g08b1.pep
NNPFVALVESQVIWLLEYIDIFLQKKFTINR

SEQ ID NO: 113034 - protein, 173 aa, Gossypium hirsutum
  Clone ID: uC-gsflnu33B013h04b1.pep
FKFNAPRVPPTVKLNYSSVLGQCLRFVNSEEIPDAVLQVLARCTAFYLDHQLNITSLSEFGNGTINKLKYCIISECPRLGTVVESEEGTEAVFPCLEHLSIHYCWRLACIWRGVVPKGSFAALRSLSLCTCPELTYVFKSSMLLFFSNLEELKVDDCEAIEKIISDDEISEAR

SEQ ID NO: 113035 - protein, 126 aa, Gossypium hirsutum
  Clone ID: uC-gsflnu33B013h05b1.pep
CFSSPPSPPVRKELPLLSLTPTPTRCEKEEEEHDDGVEDQYQDLYICNGMSKGKEGGGLVLSSGAAEDEDEDETATVALHIGLPSPTASELASVLSSSSSFSEMRDKDGDEYPVNTLSKGQYWIPT

SEQ ID NO: 113036 - protein, 106 aa, Gossypium hirsutum
  Clone ID: uC-gsflnu33B015a08b1.pep
NIFLFPNTEWAKLQISMAGLHYNFFPTDFYYPRPAQSTPSPAVDSTPPAALTTPIEEKNIVDDDNKKPVIVVYRGNKTSVSIRKQGEQHGRSYVRNRVEQIKLSRN

SEQ ID NO: 113037 - protein, 179 aa, Gossypium hirsutum
  Clone ID: uC-gsflnu33B015b09b1.pep
FLAIHGDWQDGARREVIGIFGNRNPQPEGIAKLKTMTMIINETLRLYGPSNGMLRRVGREVQMEKVVLPANIDILIANVALHHDPKLRGEDVHLFKPDRFAEGIAKATNYNPAAFFPFGLRPRTCVGMTFATTETKIVLSMILQRYAITLSPAYVHSPIPIISLKPQHGIQVILMSLHS

SEQ ID NO: 113038 - protein, 61 aa, Gossypium hirsutum
  Clone ID: uC-gsflnu33B015b12b1.pep
ITLVVKLTCMNQMCVDCHLYILEDQHPACFDGKVWDQLQNEALRSKFSSIYPKWNHTNIIL

SEQ ID NO: 113039 - protein, 156 aa, Gossypium hirsutum
  Clone ID: uC-gsflnu33B015c02b1.pep
MVATDQKVAAAVMGLSDQATGRKVSVVESWVTVESITDSCMDEGDMGSCTDVDRMRNLDKDTYPGFISDGWHRVLWVNEAFKSMVGGEGAETAVGLVVKEGFKFPQGAFSCRVGLRYGDGKGKKKQSKMVPCDVWKMSFGGFAWRLDVKAALSLGL

SEQ ID NO: 113040 - protein, 152 aa, Gossypium hirsutum
  Clone ID: uC-gsflnu33B015c10b1.pep
SNIPTLDVVKDINGDGRITQVKIDTKRSIRWFLAINTEEIEDFTFNVGLEELVAADGKRSIDGWHTIQASGGKNAPTKFELTLFWLQNSTRRSDKMVQSEQRPLLRIRTDLPGVVTPKVETVLEKLPPWYSLFGKSTSPHTLSFLSSLPIDF

SEQ ID NO: 113041 - protein, 56 aa, Gossypium hirsutum
  Clone ID: uC-gsflnu33B015c11b1.pep
RQSTTSLISVVSQTIDQADRGESSDSRPSFGVSLGNLRTSMHVYSSMDSLMPLTRI

SEQ ID NO: 113042 - protein, 138 aa, Gossypium hirsutum
  Clone ID: uC-gsflnu33B015d10b1.pep
LMQKGLMEDAVEYLERAISKLSLAGHPTEVENVDLLILSSQWAGVVYMKQGKKAEGLAHLETIASLKEPEDPKSKAHYFDGLLLLASALFDFGRKAEALKFLKLVVAYNPKYNYLLEELKNEEDDFASNLASSRRRGY

SEQ ID NO: 113043 - protein, 166 aa, Gossypium hirsutum
  Clone ID: uC-gsflnu33B015f05b1.pep
MGVQAHQEEFVGSNDHQALVIKGKRTKRQRPSSPFGVTVTCNSSSASIGGGGVAEDYNSISSPTTSGEIHESTEEEEDMANCLIMLAQSDGPRKRMDEGKFKVGSLKLSEIATTTNKAGFSVYECKTCNRSFPSFQALGGHRASHKMPKATMAEDKKPLRLAVKDD

SEQ ID NO: 113044 - protein, 90 aa, Gossypium hirsutum
  Clone ID: uC-gsflnu33B015f06b1.pep
KSSTPVNGGQSTPCGIQCPSPVPSKATPTVSGSDTVRPCKTFFVACYHMYLENPNDPSSSTGWVAVFTEIRHIERSTTKTQAVRWLEQST

SEQ ID NO: 113045 - protein, 57 aa, Gossypium hirsutum
  Clone ID: uC-gsflnu33B015f12b1.pep
NPEMGDEEHHFEYKADAGASKDYPYSFCVSNYRLFQEILTHLVKDVFLECTIELEFY

SEQ ID NO: 113046 - protein, 66 aa, Gossypium hirsutum
  Clone ID: uC-gsflnu33B015g02b1.pep
FHVDNMLESDGLLFHDERRNAREHSNDQQTNSNATKLGGSRFDRASASHTYEGNSERNHHQPTRWR

SEQ ID NO: 113047 - protein, 84 aa, Gossypium hirsutum
  Clone ID: uC-gsflnu33B015h03b1.pep
PRAYPFPSPIINICSAIQHTLIERNPFTVSILTAPMHLFSATTATTNVSSEYTFPTSNLSLILMNRTIPVTNPPISIRTSSDAK

SEQ ID NO: 113048 - protein, 30 aa, Gossypium hirsutum
  Clone ID: uC-gsflnu33B015h04b1.pep
HIASVSCSLHVPSHISLKGSGDYQLSSEKE

SEQ ID NO: 113049 - protein, 170 aa, Gossypium hirsutum
  Clone ID: uC-gsflnu33B015h09b1.pep
MNLAGAAKNRVEFLAAVDRNRWLYDGPTLHRAIYRYNAYWLPLLAKCYEEPILEGPLVVPLDCEWIWHCHRLNPVRYKSDCEELYGKILDNTNGVSSLRGACKRQTEEIWNRLYPNEAYDFDFTKALSENASETLSGLEKHTEYDLVSAGKRQSPFFYQVSRAHMNNNIF

SEQ ID NO: 113050 - protein, 64 aa, Gossypium hirsutum
  Clone ID: uC-gsflnu33B016a01b1.pep
RVSATNQGESLYFSMWEWKIVYIFWYPFSISYHVHLHDPNFKKKNLKSYCREQCITPYSKSFKL

SEQ ID NO: 113051 - protein, 51 aa, Gossypium hirsutum
  Clone ID: uC-gsflnu33B016a02b1.pep
LVQLRSLNQNHQSLGHWLRNKASRLRCNLTCRVNPRSHTNLPNALSTLYTT

SEQ ID NO: 113052 - protein, 39 aa, Gossypium hirsutum
  Clone ID: uC-gsflnu33B016a05b1.pep
WSRGLVDSDSKSINNPGYPFSVLRGALGPLRQSSMLGSY

SEQ ID NO: 113053 - protein, 170 aa, Gossypium hirsutum
  Clone ID: uC-gsflnu33B016a08b1.pep
FGYAQNAKPREALEFFERMLNEGVETDEVTLVGVISACAQLGAAKYANWIRDIVENLGFSPTRCVVVGSALIDMYSKCGSVEDAYKAFKVMEEKNVFSYSLMIAGFAMHGYAYAALELFHEMVKIGIKPNKVTFIGVLTACSHSRMVEQGRQIFESYGEKFGISPGVDHY

SEQ ID NO: 113054 - protein, 63 aa, Gossypium hirsutum
  Clone ID: uC-gsflnu33B016a09b1.pep
MLLTVENSDLHTRADFRACLPIVPVLNNVNAVMNVIANLHNENHMNLFDVINSSLGIASEACN

SEQ ID NO: 113055 - protein, 96 aa, Gossypium hirsutum
  Clone ID: uC-gsflnu33B016b08b1.pep
FNKAHGIREHSMIHEPSLVPSAHVYGHNVWSRRAVDHTRAVGHVSDLQGINGTAKFQGSVGKFGPATEGMNGHWWDTVNHFNNKKDELKLDLSLKL

SEQ ID NO: 113056 - protein, 154 aa, Gossypium hirsutum
  Clone ID: uC-gsflnu33B016b12b1.pep
SRVRDSSLAGVTLDDVLGHAKRSEPPPSHNHTPPETVRDDPANKDKKSWKLFREKLKLRKTGSGWTSSISIPASDVNIQAKKPQNPRSVCFAETNRIAEIGDRAPVRNLRAEQLCRRSSVRYAQDHQDPVDTRMPCDGPPSRSCKPQNIHDDDD

SEQ ID NO: 113057 - protein, 49 aa, Gossypium hirsutum
  Clone ID: uC-gsflnu33B016c04b1.pep
KRPPLFFFFFFFFFFFFFFFFFLFFFFFFFFFFFFFFFFFFFFFFFSKN

SEQ ID NO: 113058 - protein, 69 aa, Gossypium hirsutum
  Clone ID: uC-gsflnu33B016c05b1.pep
KVFFCMYADVTWFLFLSLPFFFFFFFFFFFEELSSLYIESTTITFYISKTDGFFLVSSTINNLMKTEDK

SEQ ID NO: 113059 - protein, 66 aa, Gossypium hirsutum
  Clone ID: uC-gsflnu33B016c06b1.pep
SIIFYAHKTDTYASTLYAEKSTKIFETNFLKGDFSGFFQFVPLFFLFLFFLAITFTLLHFRIKRSQ

SEQ ID NO: 113060 - protein, 88 aa, Gossypium hirsutum
  Clone ID: uC-gsflnu33B016c12b1.pep
PVLIKAAPLFEPSELTSWSFYRAGIAAVGATLLILSISGLTVMGVLMDKTKCTTGAIQGIAWAFEALIFPLVYCTDGISCGHMNPYVT

SEQ ID NO: 113061 - protein, 67 aa, Gossypium hirsutum
  Clone ID: uC-gsflnu33B016d12b1.pep
DAWVYVLYELLEHAYVISLLSWLYENSLLVPIQFCLSDSSCVYFVFVSFSQYILPHQDLGWVWMGDW

SEQ ID NO: 113062 - protein, 184 aa, Gossypium hirsutum
  Clone ID: uC-gsflnu33B016e04b1.pep
CWLRWVNYLHPGLKREKMSPQEQRLVLELHAKWGNRWSRIARKLPGRTDNEIKNYWRTHMRKKAQEKKKAMPKSLSPSSSSSSITLSSSSSTTTTTTTTTTVDSLPFSGTGKVSFYDTGGPKMAALGDKSSTDFKDEKGYYSMDDIWKDIDMSEENMIKPLSHNYSEEGCNIFCPSMAFSSLDY

SEQ ID NO: 113063 - protein, 85 aa, Gossypium hirsutum
  Clone ID: uC-gsflnu33B016f11b1.pep
FEKFLVSKLNGDNSLMSCAFAHQHNAKLVLDAALCLITDNMDKLTKREEYIELVEKDPRLVVEIYEAYLSKQVNTAAHKDCSMKS

SEQ ID NO: 113064 - protein, 42 aa, Gossypium hirsutum
  Clone ID: uC-gsflnu33B016g02b1.pep
FPALYMQLTRKALVLHSFYLSSNMPFSKAIYYYEIKNTNRHN

SEQ ID NO: 113065 - protein, 64 aa, Gossypium hirsutum
  unsure (1)..(64): unsure at all Xaa locations
  Clone ID: uC-gsflnu33B016g06b1.pep
MPSQGDLERQIEQLMECKPLSEAEVKALCXQARTVLVEEWNVQTVKCTVTDCGDIHGQIYDLIE

SEQ ID NO: 113066 - protein, 59 aa, Gossypium hirsutum
  Clone ID: uC-gsflnu33B016g08b1.pep
SRVRTNVAYEGLPLEEDGQLQVQSGGAGNNMFADSGAGPGGLPFLNLPLNMQPNVQLPF

SEQ ID NO: 113067 - protein, 107 aa, Gossypium hirsutum
  unsure (1)..(107): unsure at all Xaa locations
  Clone ID: uC-gsflnu33B016h05b1.pep
MELDMVTMAASIGVSVPVIRFLLCFVTTIPVSFLWRLVPGPLAKHLYSAXQGAPLSYLSFGFSSNLHFLVPMLMDYAALALYRPKCGIITYFLGFGCLIGCHVYYMS

SEQ ID NO: 113068 - protein, 99 aa, Gossypium hirsutum
  unsure (1)..(99): unsure at all Xaa locations
  Clone ID: uC-gsflnu33B016h10b1.pep
CNTMHMMSRMGGIFRSDRGNDYDPNAILGIQNINFRDVSADNVTMAARTXTGIPVHPFSGIGIYNTTIGLTQKPKNIXWNCTEIAGVSSKCTPKPCNAA

SEQ ID NO: 113069 - protein, 106 aa, Gossypium hirsutum
  Clone ID: uC-gsflnu33B018a03b1.pep
MMHMTFYWSRQVTLLFTYWRTDSWPSYALTLLACFLASAFYPYLEYVRYRVRRGGKPTDWTTEEPFLLRPRGAGMVVKIGSLGLLVILLGCIVYFQVRIYFEFTFL

SEQ ID NO: 113070 - protein, 69 aa, Gossypium hirsutum
  unsure (1)..(69): unsure at all Xaa locations
  Clone ID: uC-gsflnu33B018b02b1.pep
THVHPLDIDLIDRMKPFDPTRRITXNEEALAHSYLERLHDISYEPVCPEPFSFDFEQQPLGEEQMKDMI

SEQ ID NO: 113071 - protein, 37 aa, Gossypium hirsutum
  Clone ID: uC-gsflnu33B018b04b1.pep
LIVNKEWEYSYKKGWKCTFERGIVHACFNFKRYRYRR

SEQ ID NO: 113072 - protein, 59 aa, Gossypium hirsutum
  Clone ID: uC-gsflnu33B018b05b1.pep
NVMLILQRLRLIRPPIFATILRDDRGNFIRALSGHLLAILEPHIVDSRDTLLVYGRWHQ

SEQ ID NO: 113073 - protein, 68 aa, Gossypium hirsutum
  Clone ID: uC-gsflnu33B018b08b1.pep
MVSGSGICAKRVVVDARHHMLGRLASILAKELMNGQKVVVVRCPNSIVYCRFLRQRSDCFTLVYASLE

SEQ ID NO: 113074 - protein, 172 aa, Gossypium hirsutum
  Clone ID: uC-gsflnu33B018c02b1.pep
SRVRVKCRLSDFLHDPLPQQLNKLYPFPLDDAAELPMGIQFNTFLCGGIGIGVCVSHKIGDALSFFTFLNTWAAIARGDTKSVVWPELVSAKLFPPRNVSVPEPVMEKSEKNIATKRLVFSASKIEEIRAKYAVDHEIRPSRIEALSAFIWSRFIASTKEKPSPNAFYVIFI

SEQ ID NO: 113075 - protein, 57 aa, Gossypium hirsutum
  Clone ID: uC-gsflnu33B018c06b1.pep
LMIDEKKMNGLHVKCYKIGKVISEGKGKGYKLGVWGGLNLNDLLGWLSSSSLLRTRG

SEQ ID NO: 113076 - protein, 60 aa, Gossypium hirsutum
  Clone ID: uC-gsflnu33B018c11b1.pep
NLPFFASRIKLGRNGVEALIPSDLIGLSEYEDKTLEALKPELKASIKKGIAFVQKQPVTA

SEQ ID NO: 113077 - protein, 78 aa, Gossypium hirsutum
  Clone ID: uC-gsflnu33B018d04b1.pep
PRVRRHLLQLPTLPPLPSIPNLPQPTMPTLPQPSIPNPVALPPLPTIPTLPPLPSLPSIPTLPTTIPSFSPPPARTTP

SEQ ID NO: 113078 - protein, 148 aa, Gossypium hirsutum
  Clone ID: uC-gsflnu33B018d10b1.pep
PRVREKVENEPEMIEDWPPVPGSKRRLVLTTQLLQQLICAPPRVVLSADASKNYETLAYFVARSVLGDACSTAYIPESDTAVPPHSGSILPEKLREQRNQSILKAAEEFIVRAKMLENGLQSLVNRASILDLRLECQDQEKVSVITRF

SEQ ID NO: 113079 - protein, 63 aa, Gossypium hirsutum
  Clone ID: uC-gsflnu33B018e04b1.pep
TQLRCLRTLVLSNLRFYFRTLIAIIDYTLFILFKNFNSFASWNLGVFFFYIYLDTRNTPWLLF

SEQ ID NO: 113080 - protein, 68 aa, Gossypium hirsutum
  Clone ID: uC-gsflnu33B018h12b1.pep
TSHLIWVFPSFSQSKICKMTAIKLFFDYTIIDLFLFILSDVYFGSFNFGRPFFFFFFFFFFFFFFFFP

SEQ ID NO: 113081 - protein, 122 aa, Gossypium hirsutum
  unsure (1)..(122): unsure at all Xaa locations
  Clone ID: uC-gsflnu33B019a01b1.pep
VPARSPKINDLSWAFTPSSPAGPFRDEITPTPTPTPTSTSTPTPDPAVTPTLTPTPTPTPTPTSTSTPTPTPTPTPTPTPTPSSXPTLHPTPPPPQQVALLLVLILLPPSFSPSPLSLQLAW

SEQ ID NO: 113082 - protein, 146 aa, Gossypium hirsutum
  Clone ID: uC-gsflnu33B019a02b1.pep
MAVDSKFQSMDIDVKIKKFTWRIQNFSSLEVKKLYSEVFTVDGYKWRILIFPKGNHVDHLSIYLDVADSATLPYGWSKYAQVGFGVIDQFDRETSSTRVTQHCFNAREADWGFTTFLCLTELHNPKRGYLLNDECLVEYTFVLIRL

SEQ ID NO: 113083 - protein, 110 aa, Gossypium hirsutum
  Clone ID: uC-gsflnu33B019a03b1.pep
LGSIIEGYPVLKVGLRYPLVFYTAARFRCRFGEYVLCLVFWFFFFFFFFFFFFFFFFFFFFFFFFFFFFDATQNKSFIYQLYHTKWKQSQNQDMRVHVIYDYNSSSSSTH

SEQ ID NO: 113084 - protein, 100 aa, Gossypium hirsutum
  Clone ID: uC-gsflnu33B019a05b1.pep
FTRPPGLVRVQRGISYNIFVDNKACREFLNSKFNATAIDMETAAIALVCHQQNMPFIAFRSLSDLAGGGSALSNEAASFATLAAQNAVDVLLRFISLLSS

SEQ ID NO: 113085 - protein, 75 aa, Gossypium hirsutum
  Clone ID: uC-gsflnu33B019a07b1.pep
AHDWNLREGYAQETTSNDTNVLHVANGKKTEGGPERMSTHGRHASRRTRYGGSERCKGRKGRRQQWFMRKRTEQI

SEQ ID NO: 113086 - protein, 75 aa, Gossypium hirsutum
  Clone ID: uC-gsflnu33B019b04b1.pep
YQLLQPLPQCPPLCTHLRRLNSRLLSHPLGIPQWIHHSQQKSSSYLSQNHMQSLTKPPKYQAKIHGIMNGTERRR

SEQ ID NO: 113087 - protein, 84 aa, Gossypium hirsutum
  Clone ID: uC-gsflnu33B019b10b1.pep
SIFGGSIAGLHSPSQLFLLDPSEEKPSWRTLNVPGQPPKFAWGHSTCVVGGTRVLVLGGHTGEEWILNELHELCLASRQDSDSS

SEQ ID NO: 113088 - protein, 37 aa, Gossypium hirsutum
  Clone ID: uC-gsflnu33B019c01b1.pep
LRVRPRVRLNSIFMVTMAVLTVFPLEPSVRRAHWMLL

SEQ ID NO: 113089 - protein, 70 aa, Gossypium hirsutum
  Clone ID: uC-gsflnu33B019c04b1.pep
YILSKMKAIFLILCILLASILAFPTSTMARELAEKEAIPSPTHCALDPNRSCIPKSTPAPKCPTYSRNCH

SEQ ID NO: 113090 - protein, 86 aa, Gossypium hirsutum
  Clone ID: uC-gsflnu33B019e03b1.pep
QCLASGYGSGPQIHHGGQLKRFKIIEVGRVRGARRQHAIVSYSKVQRRHLAQVVLSRLLHVDVVVHVWGIFLCGCVRLSATSCMLV

SEQ ID NO: 113091 - protein, 97 aa, Gossypium hirsutum
  unsure (1)..(97): unsure at all Xaa locations
  Clone ID: uC-gsflnu33B019e06b1.pep
LQAKIKELKEEKNELRDEKQRLKADKEQLEQQVKAMSAQPGFLTHPPSISDALAAQRQAAGNKXMPDIGFPSLAMRQFMTPAAVDTSQDHVLRPPVA

SEQ ID NO: 113092 - protein, 93 aa, Gossypium hirsutum
  Clone ID: uC-gsflnu33B019f02b1.pep
SCAVERDGADSRPVPASSPPAKSPGGGASTTTPSSSGFPPDIVAVPTTDEDPVPAPSQSKSWSNKGETHHARAAAHDMLGPCGTPKEAPGPSL

SEQ ID NO: 113093 - protein, 71 aa, Gossypium hirsutum
  Clone ID: uC-gsflnu33B019f03b1.pep
VFSSREVSRATLKLDDPQTGDSEELRGSTEHTRTQSNLDWLMTSYGHSMKAQQDPYGHAIMLHRYYKRMRA

SEQ ID NO: 113094 - protein, 96 aa, Gossypium hirsutum
  Clone ID: uC-gsflnu33B019f07b1.pep
QVPRGKDEKDLREKRVWMLPSCYMKVKRAIFGGEDRIQMRKRGRKRRRSSRRNIMVVLMRKELLKRWGSVRKSMRCGNGLILRMIKTVLGLWMMRI

SEQ ID NO: 113095 - protein, 93 aa, Gossypium hirsutum
  Clone ID: uC-gsflnu33B019f12b1.pep
SGISTMWMYSKCSKFRDPVCFPLESPLISAQSNSLALHHESLSLSFQTEGNIGSCTCHPHSSLLGIPGNPISAIIHLTLKNLHVNVYDSCFSN

SEQ ID NO: 113096 - protein, 66 aa, Gossypium hirsutum
  Clone ID: uC-gsflnu33B019g08b1.pep
LTRPPTRPKKKKNLKKIKKKKKKKKKKKKVGFLGGIKLSFAGGGGFEVLKLGTLNQTKLSIGGGGF

SEQ ID NO: 113097 - protein, 47 aa, Gossypium hirsutum
  Clone ID: uC-gsflnu33B019h11b1.pep
AHVPQRSALIPSVSHRSTPSFVIGSSAVECLYQAVFAAMVPSVSVMT

SEQ ID NO: 113098 - protein, 168 aa, Gossypium hirsutum
  unsure (1)..(168): unsure at all Xaa locations
  Clone ID: uC-gsflnu33B022a12b1.pep
TSKGRRARSDXWTNVNEASSRSHCLTRIVISRRGDTPEAKPKISKLWMVDLGGSERLLKTGATGQTLDEGRAINLSLSALGDVIAALRRKKGHVPYRNSKLTQILKDSLGVRXSKVLMLVHISPXRKDLEETILFLSFAKRAKAVDSCRRLPEDLKKLREKRDIELGE

SEQ ID NO: 113099 - protein, 64 aa, Gossypium hirsutum
  Clone ID: uC-gsflnu33B022b04b1.pep
VSLLMDLTEGVGESSSPPRSFGNFNNYDIRTDVFNRLVEIGYEEAISNSDFRNKETTSFTSCDA

SEQ ID NO: 113100 - protein, 109 aa, Gossypium hirsutum
  unsure (1)..(109): unsure at all Xaa locations
  Clone ID: uC-gsflnu33B022b06b1.pep
MNQKANVSKELNSKHTKILDGLLKLPENRECADCKSKAPRWASVNLGIFICMQCSGIHRSLGVHISKVRSATLDTWLPEQISFIQSMXNKKSNIYWESELPPNYDRXGI

SEQ ID NO: 113101 - protein, 68 aa, Gossypium hirsutum
  Clone ID: uC-gsflnu33B022c04b1.pep
GFENRRGRNDQGYPLKRAPPFFFLYLFFFFNFSCFYFFFFFFFFFFFFFFFFFFFFFFFFFFFFFFGR

SEQ ID NO: 113102 - protein, 57 aa, Gossypium hirsutum
  Clone ID: uC-gsflnu33B022d03b1.pep
KSGSIKRPPPFFPLYFFFSFLFFFFFFFFFFFSFFFFFFFFFFFLIFFFFRTRGRTR

SEQ ID NO: 113103 - protein, 67 aa, Gossypium hirsutum
  Clone ID: uC-gsflnu33B022d05b1.pep
ERLARIVRTPSSIHLAEGQTINKGVASRLGITLYFSIGQGIQCKVRILSMILNLQEQMTKFARSIRT

SEQ ID NO: 113104 - protein, 39 aa, Gossypium hirsutum
  Clone ID: uC-gsflnu33B022d09b1.pep
FTTVSIRPRGKAKKEVIMQRTCSPYKGFYSSGLIYNLKD

SEQ ID NO: 113105 - protein, 71 aa, Gossypium hirsutum
  Clone ID: uC-gsflnu33B022f05b1.pep
LALLSLVRQHSKLVLLLSSIVPAGAVHFICLLSLSFILMYDDMVQIEIIDFVVTEYQWKLNFGDEPHTQHS

SEQ ID NO: 113106 - protein, 65 aa, Gossypium hirsutum
  Clone ID: uC-gsflnu33B022g03b1.pep
PQISEMSLSLAGLCLRESTNERYISLKLFGSTLGYSMLVNIVYTYRGLQRSSAYSHNGTIKGSRD

SEQ ID NO: 113107 - protein, 91 aa, Gossypium hirsutum
  Clone ID: uC-gsflnu33B022h10b1.pep
KSTVAKSAGSPRPTGSVAPALTRSYRLFQQGSNFGLSPAAPTRDSLLPVRRMYMFFFFFFFPFFFFFFFFFFFFFFFFFFFFFFFFFFFFF

SEQ ID NO: 113108 - protein, 82 aa, Gossypium hirsutum
  Clone ID: uC-gsflnu33B023a06b1.pep
YASGNFVQPTIVEISPDANAVNEEGFCEPYRWFQKERLYDVLAFHFLFPLFIYDFSFLSLFLSLTPNLILNQRQTPLFFLFY

SEQ ID NO: 113109 - protein, 52 aa, Gossypium hirsutum
  Clone ID: uC-gsflnu33B023a07b1.pep
TKASKTETIMPTDGIKIYAKKISLVFLEESSLKLHSAQELINPNSLGLRIMT

SEQ ID NO: 113110 - protein, 86 aa, Gossypium hirsutum
  Clone ID: uC-gsflnu33B023b09b1.pep
SSPQLDVISPVHPDCWVIDTLYPGKVRISNRAPAATYYTRIKYEGKMLEVQAFSYCWGFLTAEERSRGRNTGQNKAVFLLAHKCAN

SEQ ID NO: 113111 - protein, 110 aa, Gossypium hirsutum
  Clone ID: uC-gsflnu33B023f01b1.pep
LVFYLAELGLMQYSSAVSYCPSMLAAAAVYAARCTLGESPLWSETLKHHTGYSVEQLIECAKLLVKFHSTAAGSKLKALYRKFSSPDRNAVALLAPAKSLLPVAIHDGEC

SEQ ID NO: 113112 - protein, 97 aa, Gossypium hirsutum
  Clone ID: uC-gsflnu33B023g01b1.pep
CAYLPEGEDRDHPACNPFGPRGRTLEGLKFPKSLVVVAGLDLIQDWQLAYVEGLKKSGQEVKLLFLEKATIGFYFLPNNDHFYCLMEEMNNFVHSNC

SEQ ID NO: 113113 - protein, 55 aa, Gossypium hirsutum
  Clone ID: uC-gsflnu33B023g07b1.pep
QNNLFDIFNQFVMSCHAHRSLRQSICLYTLQSIQARIKRQVIQSIKKIPQTPGMN

SEQ ID NO: 113114 - protein, 156 aa, Gossypium hirsutum
  Clone ID: uC-gsflnu33B023h04b1.pep
VSLTKESATSKSVYFAHCTSEMIFITHLLAEEPEKLAGPLLADTYVTLLKGRNAWYGQMLAKGELSRDMGDSISGKGMIQGVSAVGAFYELLSQSSLSVLHPDGNKPVAPVELCPLLKTLYKILITREKTAEAILQALRDETLNDPRERIEIAQTH

SEQ ID NO: 113115 - protein, 65 aa, Gossypium hirsutum
  Clone ID: uC-gsflnu33B024a01b1.pep
VLESNQKWYGCSNTYGHPLHSHPMSHSVRCPFAIINKWLTTIHGQLASANSITGTMKRNHPFGFH

SEQ ID NO: 113116 - protein, 35 aa, Gossypium hirsutum
  Clone ID: uC-gsflnu33B024c03b1.pep
FIILMRVRESGNLIINEGISKQFMNEKMRCSDIVK

SEQ ID NO: 113117 - protein, 36 aa, Gossypium hirsutum
  Clone ID: uC-gsflnu33B024e05b1.pep
VDITSNIFSVFCKMYIYNKFHCAIKKSFDYDLYYYP

SEQ ID NO: 113118 - protein, 33 aa, Gossypium hirsutum
  Clone ID: uC-gsflnu33B024g03b1.pep
VGLIHANHGEGIKQFLRESLRGTNVEDIQHGAC

SEQ ID NO: 113119 - protein, 49 aa, Gossypium hirsutum
  Clone ID: uC-gsflnu33B024h08b1.pep
KALKEVDRGGHWVIYAKGYKTPVLDSTARTGDKLLCWLKGEYESYGAGD

SEQ ID NO: 113120 - protein, 55 aa, Gossypium hirsutum
  Clone ID: uC-gsflnu33B025b06b1.pep
TDQRLQGGFQRPPFPKRRFRCNGPTCLLPTDLSQWSRKDVLATRSPLLKRHITTG

SEQ ID NO: 113121 - protein, 83 aa, Gossypium hirsutum
  Clone ID: uC-gsflnu33B025d11b1.pep
ASPFFLLFWSLLKLFLICTSPCPSEPLEHCRFLSVFTVGSGKDSLEDVEGSESLGILLGCSLTIERGTADDKILFSLVKFIFK

SEQ ID NO: 113122 - protein, 70 aa, Gossypium hirsutum
  Clone ID: uC-gsflnu33B025e10b1.pep
HASACYTLTPFVQANPVCRSENFSTVHVKHLKIGSQHRNAVKVCATRRRRAAYSRTETYVLLEPGEDEKF

SEQ ID NO: 113123 - protein, 61 aa, Gossypium hirsutum
  Clone ID: uC-gsflnu33B025e12b1.pep
KGDLSFQLLFHMMHSQYSIGKMLDGKPSFNPPSCSGVGARVRVPRPCDDRQRAKLGLQGFL

SEQ ID NO: 113124 - protein, 54 aa, Gossypium hirsutum
  Clone ID: uC-gsflnu33B025f09b1.pep
CICLHVSWWLEFLPVRPCIVHIVLHASVVKTDVSGCGVCLTQFSLVRIERVELG

SEQ ID NO: 113125 - protein, 55 aa, Gossypium hirsutum
  Clone ID: uC-gsflnu33B025g06b1.pep
PSLPRYNISPGYLRHVSTIFATKAHGTIRPHPSQFCFRALYGQRLVIPSSEQSPT

SEQ ID NO: 113126 - protein, 34 aa, Gossypium hirsutum
  Clone ID: uC-gsflnu33B025h08b1.pep
RYSGLTKTVMSVFVFDVRVISLTSRFQIPFVPVC

SEQ ID NO: 113127 - protein, 87 aa, Gossypium hirsutum
  Clone ID: uC-gsflnu33B026a05b1.pep
SHGLGLLIATVALKGSQIYGKGLRYRTGRQAWLRENRSYVRLTMRLRSTTRYGYLPSISSYVGMPHSNAPVWDYTSLAETQFTVEHL

SEQ ID NO: 113128 - protein, 184 aa, Gossypium hirsutum
  unsure (1)..(184): unsure at all Xaa locations
  Clone ID: uC-gsflnu33B026d04b1.pep
STRPLPCKPLPGFQSYKSLAMLSGHIGSVSCLALCGEFILSASQGKDIIVWQQPDLRQFTKFGQGDGSVKALVTVSNKVFTAHQDSRIRVWKVSRSTENVFKLVDTLPTTKDYLGKFMKQSNYIQTRRHHKRLWIEHADSISCLAVYNGLIYSGSWDKDPKVXRISDXECMESIKAHDDAINCW

SEQ ID NO: 113129 - protein, 49 aa, Gossypium hirsutum
  Clone ID: uC-gsflnu33B026d11b1.pep
LPEISAVILEKICQYFYWALQYSRGKETEFHIEPELTLELMMAANYLHT

SEQ ID NO: 113130 - protein, 158 aa, Gossypium hirsutum
  unsure (1)..(158): unsure at all Xaa locations
  Clone ID: uC-gsflnu33B026e08b1.pep
MANNQLGVLNALDAAKTQWYHFTAIVIAGMGFFXTDAYDLFGISLITKLLGRIYYTNENHPKPGTLPPNVAAAVNGTAFVGTLAGQLFFGWLGDKLGRKRVYGLTLMLMVVCSIASGLSFXKSPAGVMTTXCFFRFWLGFGIGGDYPLSATIMSEYAN

SEQ ID NO: 113131 - protein, 53 aa, Gossypium hirsutum
  Clone ID: uC-gsflnu33B026h02b1.pep
LLYIKSQAAKGGALRDVGGTLPPNVNIGIPAGTNTERLEIKNQHQKETGFSIT

SEQ ID NO: 113132 - protein, 72 aa, Gossypium hirsutum
  Clone ID: uC-gsflnu33B026h09b1.pep
FSWTLEILFPESYFVHEKQVAQPVCFYNFKGFKKRESFSSYPHINGENRCTGHLLFSSANQNVRNSCKETMK

SEQ ID NO: 113133 - protein, 126 aa, Gossypium hirsutum
  unsure (1)..(126): unsure at all Xaa locations
  Clone ID: uC-gsflnu33B028a04b1.pep
CFAALFINNNEFMIHLPDNIANTHIFYLTLANNKFNGPLPRTIFKAFSSLAEVLLLNDQLTGCIPYEIGLLKEAVVFDAGNNQLTGHLPFSLACMEKXEQLNFAGNLLFGAVPEVACEPGKLMNFH

SEQ ID NO: 113134 - protein, 152 aa, Gossypium hirsutum
  unsure (1)..(152): unsure at all Xaa locations
  Clone ID: uC-gsflnu33B028b04b1.pep
LLVRTAVKSWHETSKVDPRVYFLLDKEKSQADKYAPVVNIDKAFESPHTHSSCFSFLRQYAEDSFSRAACLVAPKSIIAYPQVWKGQGSRKWKHGQHDGFFVQFESPLLRKLWFISSSNEMGKTLCRDPEVLDIGAHEVFPRLFKEKLSXSS

SEQ ID NO: 113135 - protein, 81 aa, Gossypium hirsutum
  Clone ID: uC-gsflnu33B028b10b1.pep
NIDSCVKTEIFTMSNAKNYLEDHILWFALIPLSEVILKNGKLEGESFLSSTDLFHLPAGFSQLMVEHIGSSPDVMTIPNDW

SEQ ID NO: 113136 - protein, 49 aa, Gossypium hirsutum
  Clone ID: uC-gsflnu33B028b11b1.pep
ESTPAPSPSTVSIAQDGMLTAHTDQSFCREFVTPRHVKISSLRHESMHA

SEQ ID NO: 113137 - protein, 56 aa, Gossypium hirsutum
  Clone ID: uC-gsflnu33B028c04b1.pep
LVDAYHGWDQKSRLSLDDLIAECTTFYISGQETVKFLLSWIGLYMVIHGAWQEIWV

SEQ ID NO: 113138 - protein, 36 aa, Gossypium hirsutum
  Clone ID: uC-gsflnu33B028c12b1.pep
AAYFPLWLSTTIRRLYPRASPSVILFPIQRPVRMKR

SEQ ID NO: 113139 - protein, 142 aa, Gossypium hirsutum
  Clone ID: uC-gsflnu33B028e11b1.pep
FYASDRSYRAPEVILGLPYDQKIDLWSLGCILAELCSGDVLFSNDAVVMILARMVGMLGPIDMEMLENGQETYKYFTKEYDLYHINEETDQLEYLISEESSLEHHLQVSDVLFIDFIRHLLEMNPRRRPNAREALKHPWLSH

SEQ ID NO: 113140 - protein, 112 aa, Gossypium hirsutum
  unsure (1)..(112): unsure at all Xaa locations
  Clone ID: uC-gsflnu33B028f02b1.pep
CYASAHASAHAGVRVVTNAFSKSIWGIYQHFFSTGSPLCFKPRPPGCWECIXTYSRLALYVTIGFSLGGGYLAEMSASTFAGGGKRTRGGHFISAKVESYTRCLEVICVWGS

SEQ ID NO: 113141 - protein, 181 aa, Gossypium hirsutum
  unsure (1)..(181): unsure at all Xaa locations
  Clone ID: uC-gsflnu33B028f03b1.pep
DAWAELGYPYEAIHVTTADGYILLLERIPRRDARKAVYLQHGIFDSSVGWVSNGVDGSSAFAAYDQGYDVFLGNLRGLVSRGHVDKNISSRKYWWITVNELGTKDIPAMVEKIHEIETDDIKMIQPDEETNDEQPYILGAIAHSLGGAAMLMYTVTRLIEQKXYRLSRLTLLSPGGFHDET

SEQ ID NO: 113142 - protein, 73 aa, Gossypium hirsutum
  Clone ID: uC-gsflnu33B028f04b1.pep
LTRPFFFFFLEMLCTPLTVLLLQTALHDNVAVELCKNCTDIYSVLSGKSLSFLILLPSAADVLFYIKKIRLEV

SEQ ID NO: 113143 - protein, 69 aa, Gossypium hirsutum
  Clone ID: uC-gsflnu33B028g10b1.pep
LIILFRVKKKFKLLISSKIASFDLLTKVYIIKYKFYTYLVAYSSYLIYIYIYIFNQLVNDTFVKSARVE

SEQ ID NO: 113144 - protein, 55 aa, Gossypium hirsutum
  Clone ID: uC-gsflnu33B028h12b1.pep
VIWEWLPSIDPYMSMMTLLLLHSMSLLFVKMLFLFSCVHATREILKSKNDEPESC

SEQ ID NO: 113145 - protein, 88 aa, Gossypium hirsutum
  unsure (1)..(88): unsure at all Xaa locations
  Clone ID: uC-gsflnu33B035a11b1.pep
MAVYHLLHKDVXRASTQWADIHRKLGNLPPKPPSFKPDPLEPAPDPDSVPKDKSRIDEQTEEELEEIEDDVDDYRFLEEYIMKRLAEM

SEQ ID NO: 113146 - protein, 104 aa, Gossypium hirsutum
  Clone ID: uC-gsflnu33B035a12b1.pep
AEEALSQGLEALNQSLSDIIISDSLSCPPNMSNYMGQMAIAINKLSTLEGFVRQADNLRRQAIHRLHQILTIRQVAKCLLAIAEYFHRLRALSSLWLARPRQEQ

SEQ ID NO: 113147 - protein, 56 aa, Gossypium hirsutum
  Clone ID: uC-gsflnu33B035b01b1.pep
VMGCEAGHPQRSDAICCEHLGHPLVLERWQILGGKMGSPISCFLHRPSAFSKTSSG

SEQ ID NO: 113148 - protein, 41 aa, Gossypium hirsutum
  Clone ID: uC-gsflnu33B035b06b1.pep
FFYRLARIDTWRGVHSCSLVWHRMAYNLWEGHLLLFILLIG

SEQ ID NO: 113149 - protein, 64 aa, Gossypium hirsutum
  Clone ID: uC-gsflnu33B035b09b1.pep
RSPFMRWATRADEGGKAYAWDPNISEMAPRQRFNVDWHHEQGLRADCLFFHKHVTCAQHPLLLC

SEQ ID NO: 113150 - protein, 75 aa, Gossypium hirsutum
  Clone ID: uC-gsflnu33B035c01b1.pep
AVGQWQRAQFLAGCLRMRSLIDCPSRGGVASAVSSVRVLEPLSETAVHLGLCSFASDSGQLVASAYPVSGGVNTR

SEQ ID NO: 113151 - protein, 48 aa, Gossypium hirsutum
  Clone ID: uC-gsflnu33B035c04b1.pep
TWLFSSCYCYSSLHVFHPCRSHRESLLHSQVCAFSFSTIFVALSIITL

SEQ ID NO: 113152 - protein, 44 aa, Gossypium hirsutum
  Clone ID: uC-gsflnu33B035c10b1.pep
IHTFMSKNKYFANLPSKKLTYRISHCNFKKKKKLKTLAGNSRYS

SEQ ID NO: 113153 - protein, 80 aa, Gossypium hirsutum
  Clone ID: uC-gsflnu33B035c11b1.pep
ESDKPIREDNKPPVCGVVDFDRGEGTERSASPVTGVPGRGTGDSVLLIDAINKFNTNMMKLLNQQRITIRQQPNLLQSSF

SEQ ID NO: 113154 - protein, 132 aa, Gossypium hirsutum
  Clone ID: uC-gsflnu33B035c12b1.pep
AIRIFWRFLRADKDANIVNRKMRKGAQVEPTEPDELQLLATVQTSLQKKDKKLREIVRSGNCILRKLKKNEEENSDQVLHFFSQVDLKLVARVLNMSNVTRDQLLWCHSKLSKINFVNRKINVEPSFLLFPC

SEQ ID NO: 113155 - protein, 56 aa, Gossypium hirsutum
  Clone ID: uC-gsflnu33B035d05b1.pep
SIINHSSPGAVSFEEQLVSSVDSLTAEVCIHNSSLSLIHISILLGSFGLSLSSTAQ

SEQ ID NO: 113156 - protein, 57 aa, Gossypium hirsutum
  Clone ID: uC-gsflnu33B035e05b1.pep
RSRSQGRTLWNNILLGCQTTIEYEHTWFLRRITTILYPLPYRSSSTTFKGIQPLLLD

SEQ ID NO: 113157 - protein, 97 aa, Gossypium hirsutum
  Clone ID: uC-gsflnu33B035e07b1.pep
PQVDLISYCIRCVLYDPSGSPICTEGRHRHNLQNPMLHGLQMVSSKDARCTFVRAEPSILDNTCTGILCSMFEAKISGIPPFLWNPAPCILRFPRKR

SEQ ID NO: 113158 - protein, 72 aa, Gossypium hirsutum
  Clone ID: uC-gsflnu33B035e11b1.pep
FYAGKNTMFFLYTNWSKKPIEFFFFTLYFLSLSRQNQLSHMPYKNPPPTPNRKNKNSGFHFFFFMTSSRTRG

SEQ ID NO: 113159 - protein, 65 aa, Gossypium hirsutum
  Clone ID: uC-gsflnu33B035f07b1.pep
ALSRYIYTSLSVSHLPPWPCLSKWARVAGYMRALQMPGLVSSHKDDELLQPAWAMDHCIYEGVAP

SEQ ID NO: 113160 - protein, 57 aa, Gossypium hirsutum
  Clone ID: uC-gsflnu33B035g01b1.pep
FTSKVSCILRSTIVVPYRDMNLHLTMPIFYNDVTGKSQNRTQRNRLAAQDMLARRCN

SEQ ID NO: 113161 - protein, 56 aa, Gossypium hirsutum
  Clone ID: uC-gsflnu33B035g08b1.pep
YLWFPCILLPHSFPSLFKQVPWYTVPNSLIVGINFLWNAVKAVVRVLSKNLHCRRI

SEQ ID NO: 113162 - protein, 98 aa, Gossypium hirsutum
  Clone ID: uC-gsflnu33B035g09b1.pep
GDFGKWGPFTLLPLKGKRSLIRIVGLFFPASSWAASSFFFSEPVLATEAKAAGASSVSGASRRVAVAAGASPAGSAGWCLQYWSRMVRPRPSRRWEQW

SEQ ID NO: 113163 - protein, 56 aa, Gossypium hirsutum
  Clone ID: uC-gsflnu33B035g10b1.pep
SISFGLESINRESTPYARKSSSVKLSFAYFGMKFVWLMTNILFHHNPDRPAVRTRD

SEQ ID NO: 113164 - protein, 69 aa, Gossypium hirsutum
  Clone ID: uC-gsflnu33B035h03b1.pep
IVLTVSADLSKCFFTRQVLKCRCRQYLIVSPGLGFYSSCVLIRLMESIDCSKHESMIFARHHSPLMESW

SEQ ID NO: 113165 - protein, 109 aa, Gossypium hirsutum
  Clone ID: uC-gsflnu33B035h05b1.pep
SPACTRPCLPGWTHPARPLVRASGHAFLSIRTLLSLYLHCCILVCNQRSHQNERITHEERPNWQQINWLFQAALCFLPSKFVEQKRLVIHAAIPSEQVVLHCLNGFQLT

SEQ ID NO: 113166 - protein, 44 aa, Gossypium hirsutum
  unsure (1)..(44): unsure at all Xaa locations
  Clone ID: uC-gsflnu33B035h08b1.pep
AIVYQENLGEIQPCRAPLKKGGLCXRRDLXVCPFHGPIIPSDDA

SEQ ID NO: 113167 - protein, 50 aa, Gossypium hirsutum
  Clone ID: uC-gsflnu33B036a05b1.pep
SADFDMSLCISNYGIWRYSLTIRHYKVTKDNARRARRNKHTYISALGHRN

SEQ ID NO: 113168 - protein, 103 aa, Gossypium hirsutum
  unsure (1)..(103): unsure at all Xaa locations
  Clone ID: uC-gsflnu33B036b08b1.pep
LWSQRSNFLYFKQEEINAIMNDFVQRALLAPPGLYLGGTYTYGVXQGKPVLVIIGXKGSGCHTIRKHNMAMLTGCYDKPMTAVQGYRVVDRCGDYFIEQGFRP

SEQ ID NO: 113169 - protein, 67 aa, Gossypium hirsutum
  Clone ID: uC-gsflnu33B036c02b1.pep
TFLKLWRDPISLLISNPWRFHDRSYFFCCSLCLSRSTPLQGRVNTTYCTCRKEHPMSRSKSVMKLAL

SEQ ID NO: 113170 - protein, 141 aa, Gossypium hirsutum
  unsure (1)..(141): unsure at all Xaa locations
  Clone ID: uC-gsflnu33B036c08b1.pep
LXNFPLPPIPSLLLFFFLWVTMEIFLEFMFTISFSFVISFLLAKLLSFSSIIDQHLEIVSRLYAEVKTESEKHEFEEVDALCESVEEIGTQEESSNGGEELIRETEGTVEGISLSEENFASETTEIELAKEDEEGIEDLVC

SEQ ID NO: 113171 - protein, 90 aa, Gossypium hirsutum
  Clone ID: uC-gsflnu33B036c10b1.pep
SVTRIFKVIISSFGLLSRCAYVGRPKKNKGRETYLGLQELLGGVKEHGSDSPLASASMMSHRRVIGQLLLEPWVLNPFIAPDRFPLILTV

SEQ ID NO: 113172 - protein, 42 aa, Gossypium hirsutum
  Clone ID: uC-gsflnu33B036c11b1.pep
HCFLQVGLSTWVCSLDPLLPPAIVPCSPTIIVLSFLEIPPCF

SEQ ID NO: 113173 - protein, 52 aa, Gossypium hirsutum
  Clone ID: uC-gsflnu33B036d12b1.pep
LLGESHSSQKEWLGFNIKTVLQNFKQYCFLMIAWMSILGHLGAKTLLFPFCL

SEQ ID NO: 113174 - protein, 111 aa, Gossypium hirsutum
  Clone ID: uC-gsflnu33B036e04b1.pep
EKKGIFILLFWHFIVSLQFDSDIRPIKKHCKRIFLFGIHRLNTKKIEKKQKNFRGIFHFFPSFFTVFFSFLELSVRTHRTKKKIGLRRGVYLHSATVGSLFLSLQWEQMRI

SEQ ID NO: 113175 - protein, 60 aa, Gossypium hirsutum
  Clone ID: uC-gsflnu33B036e07b1.pep
GVNHGCIWRESCRRCIGDNLKRRRRDQVLGREPKRERCSLGGEDKYRCPDVRNALTMEQE

SEQ ID NO: 113176 - protein, 113 aa, Gossypium hirsutum
  Clone ID: uC-gsflnu33B036f01b1.pep
LYRVFATALGCTFPRRLHDHLHSEYDTASIFEFQSFPASYIVPFLVSSLRMLFRVKCCNKWIVQFAEALVVQCILQVVLSLECSLLHNLMNLPSNMSIKWHVVLTRRVGAHEG

SEQ ID NO: 113177 - protein, 75 aa, Gossypium hirsutum
  Clone ID: uC-gsflnu33B036f04b1.pep
FMVSLHHLVIRGCNKSFARSYRGQIATMQFTGKSQAWNLVERSRNGVMGIAGILSLDDLEKQDAQRMHNRKGLKR

SEQ ID NO: 113178 - protein, 41 aa, Gossypium hirsutum
  Clone ID: uC-gsflnu33B036f07b1.pep
SGRTEAFLLLHQQKGRFSFMVNFHYKILITPLTQRTNRLMV

SEQ ID NO: 113179 - protein, 110 aa, Gossypium hirsutum
  Clone ID: uC-gsflnu33B036g04b1.pep
CAFSGLKMYFPEYAWWYIRWVHDSVSLVRVGLRLALDALLVVVTCGLATVSVIACIMWVGHMGLGLASVGSLGASVAAALALFRIRLFGPGLEVFRWPLIHTGMSVVRVG

SEQ ID NO: 113180 - protein, 83 aa, Gossypium hirsutum
  Clone ID: uC-gsflnu33B036g05b1.pep
SLYVRGGLRLLRCCIEVVQAAARSAHSFNQWVAHIALGLANDDPLVASVPAALAMIRIRIFGPSLKVFYWPPINNSKLSVSMG

SEQ ID NO: 113181 - protein, 82 aa, Gossypium hirsutum
  Clone ID: uC-gsflnu33B036g08b1.pep
MATTAATTTVASDATTTTFSDGPVLSLINKRIRALRKKYNRILQMEEFGSQGKPLNKEQEEVLRSKPFVSALIDELEKLSHP

SEQ ID NO: 113182 - protein, 58 aa, Gossypium hirsutum
  Clone ID: uC-gsflnu33B036g09b1.pep
HFIIFICIFFYFFFFYENFIIYILSCNLRNLSNIGAYTQKVSQTQMYLNDWHDPIRYK

SEQ ID NO: 113183 - protein, 42 aa, Gossypium hirsutum
  Clone ID: uC-gsflnu33B036h02b1.pep
DQSILVTLNAHQTSAGCGSSRRISKSRSNVSLSVYAHTGVLH

SEQ ID NO: 113184 - protein, 67 aa, Gossypium hirsutum
  Clone ID: uC-gsflnu33B036h06b1.pep
LFKAVTLSLSLVQIVAWLVAALVIVINGYLLLDFFSSEVTGVIFTTVVCAFTGAYLAFIVYLVNGGI

SEQ ID NO: 113185 - protein, 78 aa, Gossypium hirsutum
  Clone ID: uC-gsflnu33B037a02b1.pep
KKKNTNIMFKNRKGLLRAPRFRPLACKAVAFLLCPLSPVDWRGVVQRLVRDYLGVSHVLEAPSHPRYRRWPNTEEGRP

SEQ ID NO: 113186 - protein, 81 aa, Gossypium hirsutum
  unsure (1)..(81): unsure at all Xaa locations
  Clone ID: uC-gsflnu33B037a10b1.pep
MAKGYEASLNESKMDAPLSTWVQISRFLWGYTVLRMPNGTTNLHLTXAIDRSEPAHVYPLVGALTLRARIDRATSRLVRVY

SEQ ID NO: 113187 - protein, 108 aa, Gossypium hirsutum
  unsure (1)..(108): unsure at all Xaa locations
  Clone ID: uC-gsflnu33B037c12b1.pep
LFIALGTARGMANFHTDGGGSXTHGHIKSSNVLPSDELEACVSDAGLTPIMNAPLTTSCIVGYRAPEVIETRKITQKSDVYSLGALLLEKPTAKAPLQPLGQDHFADL

SEQ ID NO: 113188 - protein, 103 aa, Gossypium hirsutum
  unsure (1)..(103): unsure at all Xaa locations
  Clone ID: uC-gsflnu33B037e09b1.pep
FSRPRGSLLNALLRSPEKKIMSSGGSGGSSRSCCSGCYCGENCSVNLNLAYWEKTTSTHTIIYGVAPVQMTSEGPEVGTTASRHGCRXGSSCKCHACTCGPAR

SEQ ID NO: 113189 - protein, 45 aa, Gossypium hirsutum
  Clone ID: uC-gsflnu33B037e10b1.pep
EYIGLRTMPICYSNGHPFLIPKTSSGRDIAPSVPWVASHFLNYTL

SEQ ID NO: 113190 - protein, 129 aa, Gossypium hirsutum
  Clone ID: uC-gsflnu33B037e11b1.pep
YLKPSNILLDQNMEAHISDFGLGRLANIAGGSPTTQSNRILSDKPLERLQKSASSEAAPLYSNLGSFYQAPEALKVVKPSQKWDVYSYGVILLEMITGRSPVVHVGTSEMDLVNWIQLCIEEKKPLSDV

SEQ ID NO: 113191 - protein, 44 aa, Gossypium hirsutum
  Clone ID: uC-gsflnu33B037f12b1.pep
VVAGPGYQSWALLKGRPYRFRFFAKYRHLTWEWYSLVKVEDSFE

SEQ ID NO: 113192 - protein, 116 aa, Gossypium hirsutum
  unsure (1)..(116): unsure at all Xaa locations
  Clone ID: uC-gsflnu33B037h05b1.pep
FLAADVDPHRILHQTACSYRWSTXTLSVSWTYASSAYNIPVSLPDVLHEPATCRQWKQRNVLAGVYTFNTIKFHPHLCQRPTIFYLNSEYSTPHGLIQTVHNQYHEDCTLIMDPTR

SEQ ID NO: 113193 - protein, 69 aa, Gossypium hirsutum
  Clone ID: uC-gsflnu33B046a09b1.pep
SSRVRISPFCSNEKADEVEEFFESRVTSSFAMNLKQSIEQVRIKARLVESIKQERQPLQDLLKQLVCKG

SEQ ID NO: 113194 - protein, 154 aa, Gossypium hirsutum
  unsure (1)..(154): unsure at all Xaa locations
  Clone ID: uC-gsflnu33B046b03b1.pep
LFRPEMTAEMLDYKIHAVYNSLYSTPTCYGIHMCGLLFEDLLLQGGLEEVDKKNHMKAGVLYNAIGECRGFYRSPVEKSVRAMMTVPFTLXKSELEAEVLKEAMKEMMVHLKGHRSLAGMRAAMYNAMPVAGVEKMNAFMKDYPAKHARSMSIA

SEQ ID NO: 113195 - protein, 134 aa, Gossypium hirsutum
  Clone ID: uC-gsflnu33B046c02b1.pep
MSGKGAKGLIMGKNSASNKDKDKKKPISRSSRAGLQFPVGRIHRLLKLRTTAHGRVGATAAVYSAAILEYLTAEVLELAGNASKDLKVKRITPRHLQLAIRGDEELDTLIKGTIAGGGVIPHMHKSLINRSSQE

SEQ ID NO: 113196 - protein, 84 aa, Gossypium hirsutum
  Clone ID: uC-gsflnu33B046c03b1.pep
HTVNFFQKGPSEKHTPHDKDKKVSYNSLPLPYTIHLLFSKLSKHYMVTNTTNYKVQATITQQFRRKKLRRSLYPSMHLHCNSLH

SEQ ID NO: 113197 - protein, 133 aa, Gossypium hirsutum
  unsure (1)..(133): unsure at all Xaa locations
  Clone ID: uC-gsflnu33B046c04b1.pep
ISRLIAVATDARSNMDGALKSFHMLIRSRYLSNDLPTPPTWNSIACLDKLSTLXDENTSAHKQLYKPTTLIGDPYKYNIFPTVPAQQNVTPPPTLYHTHPECVTENDSLTRFSFTGSQEINRHSTSNRAHISV

SEQ ID NO: 113198 - protein, 83 aa, Gossypium hirsutum
  Clone ID: uC-gsflnu33B046c07b1.pep
AYNTHFIGANKKLSNPRRETKVQKLDLNIYISESADRITRADKVKKQLKGQTRAHLKTSYNARWFLRRALEKSASYMTVSGEK

SEQ ID NO: 113199 - protein, 72 aa, Gossypium hirsutum
  Clone ID: uC-gsflnu33B046e01b1.pep
YCLTKIHISHNLQFYCLHRFFYEKLDSLSSNSIFNSTSISISTIFGEFSNLDHYCYPNCFDEYVYLKYLDFA

SEQ ID NO: 113200 - protein, 63 aa, Gossypium hirsutum
  Clone ID: uC-gsflnu33B046e11b1.pep
FRLVRGFLSSQPCNFWVGFFCFYRSPCVEIVRSEALFLVIVLGRAPFVVSMSPLVAFARWEVK

SEQ ID NO: 113201 - protein, 36 aa, Gossypium hirsutum
  Clone ID: uC-gsflnu33B046e12b1.pep
VLFIVQSILWQGISLGVIGPILIVLPLCRTRVRARE

SEQ ID NO: 113202 - protein, 90 aa, Gossypium hirsutum
  Clone ID: uC-gsflnu33B046f07b1.pep
SYRAEGKGNRGSIVMRWLDDHSPQIEFQSKIFTAVNILYGRKTCQIISLSVYGLFRRLDMTLLGIQQILLLGITIASLNVPISILDGDHI

SEQ ID NO: 113203 - protein, 93 aa, Gossypium hirsutum
  Clone ID: uC-gsflnu33B046f08b1.pep
SLEFARLGLVTKDKKNIAYDRTATCIDILTDTILPTVGVFLNFACQLQFWISHALTLCGYIPGFIYPIYAITKYTSNAVLVICGELLSDSRYD

SEQ ID NO: 113204 - protein, 137 aa, Gossypium hirsutum
  Clone ID: uC-gsflnu33B046f09b1.pep
MDAPKSCTPEEVATVNVISAKDLLGSNYCYLDVRTPEEFSKSHIDHAFNVPYMFITQEGKVKNPEFLKEVSLILKKDDHIIVGCNSGGRGVLACVDLIEAGYENVSNMEGGYSAWVDAGLTFVGEKPAEELKSKFRP

SEQ ID NO: 113205 - protein, 32 aa, Gossypium hirsutum
  Clone ID: uC-gsflnu33B046g09b1.pep
VVTRPRTECHDWGEQDPFENIWSEPPRDAYLN

SEQ ID NO: 113206 - protein, 67 aa, Gossypium hirsutum
  Clone ID: uC-gsflnu33B046g11b1.pep
PKLPILHKPWLQTLSLALSLLASIASHCYYTLLRLRTDLSDNDFPTFHSQKQGSLTANTDGKLLLQR

SEQ ID NO: 113207 - protein, 63 aa, Gossypium hirsutum
  Clone ID: uC-gsflnu33B046g12b1.pep
TPVLQATLTLKQAVEALKTNITFTCNAPFYFQTEGMITIKHAMGSCLQSEIFSAPVYKPLPLY

SEQ ID NO: 113208 - protein, 97 aa, Gossypium hirsutum
  Clone ID: uC-gsflnu33B046h06b1.pep
CMYVGDSGSFDLSTVAWVTVVSFSPAADPQKGISTKNSPLVFLPSHASSSELVPCRGTGWRLYGFNGLHNVGPLRESKQAGLIKTARMVRTPGRKHG

SEQ ID NO: 113209 - protein, 64 aa, Gossypium hirsutum
  Clone ID: uC-gsflnu33B046h07b1.pep
VPGPSTRASIYQMVCFCSLFSQPFLWHGFRVETGPLTSLSRGEKIHYRQALCKIKNMLLMSNTR

SEQ ID NO: 113210 - protein, 100 aa, Gossypium hirsutum
  unsure (1)..(100): unsure at all Xaa locations
  Clone ID: uC-gsflnu33B046h08b1.pep
YCLIEHVLSNRGTSIRPAVVPTDDYILSLLDEGAKSTLSGNYKRHWGMYSFDGQAKYTLDLXRETGGPSNGSNVHXLPARWRIANPNRDQCEVADHMKQR

SEQ ID NO: 113211 - protein, 93 aa, Gossypium hirsutum
  Clone ID: uC-gsflnu33B046h11b1.pep
CIAWEKMRLNRGALLGQTNFKRLLLLPLSALLQMMPGQNLVLALANYETAAETNKITESETLTLTMPGIYLNGPLVYQANHSLRWIIIGAPAN

SEQ ID NO: 113212 - protein, 104 aa, Gossypium hirsutum
  Clone ID: uC-gsflnu33B046h12b1.pep
GVVPVKPLYQFVGFLPYSASAGFPLASIWWTGIWCPLIALRPKSFGLHFSCSAMQADSCLLPLAAMVSARAIQSGSVVVFSGPILCAPRLVGNLLALKEAPDRC

SEQ ID NO: 113213 - protein, 170 aa, Gossypium hirsutum
  unsure (1)..(170): unsure at all Xaa locations
  Clone ID: uC-gsflnu33B049a01b1.pep
LFQGAEPGPPYTTGDHLITNAGKMVLLDKLLPKLKERDSRVLIFSQMTRLLDILEDYLMFRGYLYCRIDGNTGGEDRDASIEAFNKPGSEKFVFLLSTRAGGLGINLATADVVILYDSDWNXQVDLQXQNRAHRIGQKXEVQVFRFXTEYTIEEKVIERAYKKLALDALV

SEQ ID NO: 113214 - protein, 61 aa, Gossypium hirsutum
  Clone ID: uC-gsflnu33B049a05b1.pep
NKTFVYKHQLQKKGGIIPNFLLFFFGLPALIGLPSSDRVHPSLNPSRTYPQRHIVHGSEPT

SEQ ID NO: 113215 - protein, 60 aa, Gossypium hirsutum
  Clone ID: uC-gsflnu33B049b02b1.pep
LNTKLVSNLIEATNRSWKTEVIRNTFRMDVAEKILKIPASGDSTRRFLSMERGVDRGVLR

SEQ ID NO: 113216 - protein, 35 aa, Gossypium hirsutum
  Clone ID: uC-gsflnu33B049b05b1.pep
FNSLSATIDGLSSVRGLSSNQLSLSSDYEHISPHE

SEQ ID NO: 113217 - protein, 51 aa, Gossypium hirsutum
  Clone ID: uC-gsflnu33B049b09b1.pep
VKKYSRLAKHCGFQLMTSRLKQNKFFSFSLSFFFPFFFFSKREERGDRDKG

SEQ ID NO: 113218 - protein, 52 aa, Gossypium hirsutum
  Clone ID: uC-gsflnu33B049b11b1.pep
PPPPPAPPPFPTALNDLAAKAKSTRSKTKNAAPITLQLPILKPHLRKKLNAN

SEQ ID NO: 113219 - protein, 109 aa, Gossypium hirsutum
  Clone ID: uC-gsflnu33B049c10b1.pep
MELLNVPKLSINPLISSLILLFSLLIWLKLAKRKTLNLPASPPKLPLIGNIHQLGKLAHRSLWDLVRKYGSLLLLQLGYNPTVGVSSPDMVREIVGDHDIVFATDQGPQ

SEQ ID NO: 113220 - protein, 38 aa, Gossypium hirsutum
  Clone ID: uC-gsflnu33B049d10b1.pep
GTKWHYLYYAERTKVHKPMSLRARRSSKNPEREPGRGG

SEQ ID NO: 113221 - protein, 83 aa, Gossypium hirsutum
  unsure (1)..(83): unsure at all Xaa locations
  Clone ID: uC-gsflnu33B049e03b1.pep
MSIREKNRREMSENVFHRGXVCYAKKDHNLAQTPRNQKWHXLQGIQLVHSFKCKEYGMETLACMHHYWDHTNDGIESLRTYLR

SEQ ID NO: 113222 - protein, 153 aa, Gossypium hirsutum
  Clone ID: uC-gsflnu33B049f01b1.pep
SVYDGYLNGQLNVARALGDWHIEGMKDANGGPLSAEPELMTADLTEEDEFIIIGCDGLWDVFRSQNAVDFARRRLQEHNDPAMCSKDLVDEALKRKSQDNLTVVVVCFQSNPPPNLVAPRARVRRKLSAKGLRELQACWMVWETKMVTKCLLY

SEQ ID NO: 113223 - protein, 127 aa, Gossypium hirsutum
  Clone ID: uC-gsflnu33B049f10b1.pep
VVESAMNKGVCKYGKVDIMYNHAVTLEANETRVTQASSEDNKREFGSVSGRISRAKTVDRAMVPFKKGGRLFTIRLGSRIRFGRVEAYRELNQASVTKTKSIGGLLGEHGRSVNYISRHATMSARLQ

SEQ ID NO: 113224 - protein, 161 aa, Gossypium hirsutum
  Clone ID: uC-gsflnu33B049f12b1.pep
MQDPTGFQQMKAPVFPEQEQLKCPRCDSTNTKFCYYNNYNLAQPRHFCKSCRRYWTKGGALRNIPVGGGTRKNSKRSSSSSDSSSQPKRQSNPAPDSIRNQNLPDSSPPPTIPQQVLLSSAVQNSVSNADQTRMYVLSLDHQARKMTDSGGSFSSLLASSG

SEQ ID NO: 113225 - protein, 66 aa, Gossypium hirsutum
  Clone ID: uC-gsflnu33B049g10b1.pep
SKSHKVRAFSQKFPFFLGGLPPLPVVGWLAHLDNWMIVLLPSYPDRTKICASRLQPRKWVWPIHHQ

SEQ ID NO: 113226 - protein, 138 aa, Gossypium hirsutum
  Clone ID: uC-gsflnu33B049h03b1.pep
FSHFYTLPKPCIHHLRLKSPWVTPCSPDTVLLPVSIWPDADHITIGADPNLVGHYFYDADSSSLTTESTCQASSSNDPREPKSAAAAAPAPPHPSPHHPHGSYPAPSSSFLVRQRIFPAGFLSHLTSENGFSVTMGNR

SEQ ID NO: 113227 - protein, 157 aa, Gossypium hirsutum
  unsure (1)..(157): unsure at all Xaa locations
  Clone ID: uC-gsflnu33B049h08b1.pep
RLRVRLDQATLEDLLIPNFSCSMETLYNVDCVQQILEHFLAMDQITGGASPSLVDDGQITASPSLTPVTLVAKLIDGYLAEVAYDVNLKLPKFQALAASVPDYSRPLDDGLYCAEDIYLKSHPLVSESEKEQLCRLMDCQKFXLESCTHAAQMRNLH

SEQ ID NO: 113228 - protein, 65 aa, Gossypium hirsutum
  Clone ID: uC-gsflnu33B050a04b1.pep
PTLKGFRSKGIKTATFLFILKKSNLETKILDFKPVGLCGNPTGINHQTLDKEREKIRTRGRTRGK

SEQ ID NO: 113229 - protein, 147 aa, Gossypium hirsutum
  unsure (1)..(147): unsure at all Xaa locations
  Clone ID: uC-gsflnu33B050b05b1.pep
ELSKIFNRMLHHGFAPNTITFNVMLDVYGKAKLFRKVKKLFWMAKTGGLVDVISYNTIISAYGQNKDFKNMSSTIREMQFNGFSVSLEAYNCMLDAYGKEGEMENFRSVLQRMKESNCASDHYTYNIMINIYXERRWIDEVAAVLTD

SEQ ID NO: 113230 - protein, 76 aa, Gossypium hirsutum
  Clone ID: uC-gsflnu33B050c06b1.pep
SHAFELTINEEGFAGLLGVNTTQVIPESPHPRPKKPSLSRTTSLRHLQLQIFYWSSLILFRLGAKQWVFIVYTNTL

SEQ ID NO: 113231 - protein, 99 aa, Gossypium hirsutum
  Clone ID: uC-gsflnu33B050d08b1.pep
RRKERGVGIRQLERARFGKGVRPAPLVLNDRAQSGNHSSAVNGGKCEGVPGSTLLNQRPKGESGVSRKKRKMGEVRGWKVGYLEGQRPEYRFQDTIYKR

SEQ ID NO: 113232 - protein, 147 aa, Gossypium hirsutum
  unsure (1)..(147): unsure at all Xaa locations
  Clone ID: uC-gsflnu33B050d11b1.pep
HASGLTRPTISIQSYLDRIYKYANCSPSCFIVAYIYLDRFAXKKPTLPINSFNVHRLLITSVMVAAKFMDDIYYNNAYYAKVGGISTIEMNYLEMDFLFGLGFHLNVAPNTFYTYFTYLQREIMLQPPPSIAESSLSLDRSLKVHLC

SEQ ID NO: 113233 - protein, 98 aa, Gossypium hirsutum
  Clone ID: uC-gsflnu33B050g02b1.pep
TLASPTVWLKKVGSSRANIVKNLNLPVKTLRNNLPMMIVPLRDNKCQYLNEIQTRVNKDLESWIVSKLPLNILPVLIVNNTSHVPYSSCHYNITTHAT

SEQ ID NO: 113234 - protein, 151 aa, Gossypium hirsutum
  unsure (1)..(151): unsure at all Xaa locations
  Clone ID: uC-gsflnu33B050g09b1.pep
PRVREIIDSRTSNTLQCKALDHADSLGLVLISSRTRSLINWLVNALMSLQHPHSETGIPAVKIYGPKVMFDRGPAVAFNVFDWKGERIHPALVQKLADRNNISLSIGCLQHIWFSDKHEEMKEKDKFQPXIDVVTAAIGYLTNFEDIYRLW

SEQ ID NO: 113235 - protein, 65 aa, Gossypium hirsutum
  Clone ID: uC-gsflnu33B050g12b1.pep
IGTRIAGSWGLSWFFNEGPIETRLNLLKFFLHEHVPVLPESPTRGSWSWCSLALKWGKLLILGSN

SEQ ID NO: 113236 - protein, 81 aa, Gossypium hirsutum
  Clone ID: uC-gsflnu33B050h10b1.pep
GFFFFKIKSEENSIATKGVSKTNIWIPKERTKRDWNNIMYTVRYQRAEKTKKEMLLLLSTYNIILTKVKKKKGRRGRKSSI

SEQ ID NO: 113237 - protein, 74 aa, Gossypium hirsutum
  unsure (1)..(74): unsure at all Xaa locations
  Clone ID: uC-gsflnu33B051a01b1.pep
SMPASKERKEDSESEANKTFQTVHXEKIKKRGKSIQRTFKEASNREEEKKDEQNLMPTMAMETNGTHHQQVENV

SEQ ID NO: 113238 - protein, 60 aa, Gossypium hirsutum
  Clone ID: uC-gsflnu33B051b06b1.pep
VRIAHPEKYTDEGKPTPTEFEDPKLYHYAIFSDNGLAASVVVNSVTNNAKEPWKHCYPCS

SEQ ID NO: 113239 - protein, 70 aa, Gossypium hirsutum
  Clone ID: uC-gsflnu33B051c11b1.pep
ASTFSQYFHCFFLFFFFFFFSSISSYPAITTVKLQGSDNYISWSALVELWLYKDHLETKLLQVYSRRSAH

SEQ ID NO: 113240 - protein, 49 aa, Gossypium hirsutum
  Clone ID: uC-gsflnu33B051d05b1.pep
NPPTLFHHHHHHHHLLTLLTEKKKLNLGLKKPDLSQSGSMEAQCNGLLQ

SEQ ID NO: 113241 - protein, 155 aa, Gossypium hirsutum
  Clone ID: uC-gsflnu33B051e02b1.pep
PWETRLMELSTRTDPSKTCLESLSGKNERCSEPCSMKARKNNVTTRVSAKPPPHTRQVTRSSSSPSSEFRFDESSGSSSICTSTTPVSGTTVLPSDATGDSGNSRPNYMNMTVSTKAKQRSGNHGFQRQSMDEFEFKRSACFDNGDSKSSKRGNC

SEQ ID NO: 113242 - protein, 110 aa, Gossypium hirsutum
  unsure (1)..(110): unsure at all Xaa locations
  Clone ID: uC-gsflnu33B051e07b1.pep
GTKDNSGSKFESQWRSATGSPNLTADCYTRANERTQCRTGSLTVTRARVGMMPVGTPREPYRVAGDGTXKGADGGKALYQERAICIEQQMDDVLMTXIVAAGAYIDSIDD

SEQ ID NO: 113243 - protein, 42 aa, Gossypium hirsutum
  Clone ID: uC-gsflnu33B051e12b1.pep
MENLLGLLRIHVQRGVNLAARDVFTSDPYVVIRMGKQKLKTR

SEQ ID NO: 113244 - protein, 45 aa, Gossypium hirsutum
  Clone ID: uC-gsflnu33B051g02b1.pep
YCYRCGNMASILEVDDCKSHTFIQFEPAPRRGEPDVTRRTPDYFL

SEQ ID NO: 113245 - protein, 48 aa, Gossypium hirsutum
  Clone ID: uC-gsflnu33B051g04b1.pep
WGRMTWPGLESNLGPSKWSCSPIVVNLQCLMLRSVGYGRCRLCRVNLQ

SEQ ID NO: 113246 - protein, 130 aa, Gossypium hirsutum
  unsure (1)..(130): unsure at all Xaa locations
  Clone ID: uC-gsflnu33B051g07b1.pep
GLVLPSDSPLRTSLLTEFHLSPVGGHSGITRTFHRLTTNVYXKNMHRDVRSCQICQQMKSATISPAGLLQPLPISIFIFENISIDFITEFPPSKGKTVVMVVVDRLLXYGPFVGLSTHFSQQIVAFCFWQ

SEQ ID NO: 113247 - protein, 81 aa, Gossypium hirsutum
  Clone ID: uC-gsflnu33B051h01b1.pep
KKKPLYISVLWLYSRIPPSITGLSTLYYFCLCSLLFCLLLWFCKCQRSDGMVACCRHGQERGTAHMGLGRRGARMSWVFAY

SEQ ID NO: 113248 - protein, 62 aa, Gossypium hirsutum
  Clone ID: uC-gsflnu33B055a05b1.pep
PPLTLACSVLLATLQWKEPASHFAARQQKIEDTLTAKQIPIITLVPPKSNPTYPEFPTRLTS

SEQ ID NO: 113249 - protein, 113 aa, Gossypium hirsutum
  Clone ID: uC-gsflnu33B055b05b1.pep
FNRSALIATVGKNCSAIDRERRLGVQLQTIVTYFQRIDKAHDRLLLGFSGLGTGAQTLYQRLGSRYKLTELRDERDTKPDTIANLDYAILYEKRLGPYLSQPAIAGLGDEDMA

SEQ ID NO: 113250 - protein, 175 aa, Gossypium hirsutum
  Clone ID: uC-gsflnu33B055c02b1.pep
PRVRGIVYQLGIANHSTSIAVYLLSWIYIFVAFGIYLVISYARDKYAAKEHIYFRMVQFLVIILGILVIIALLEFTAFNFVDIFTSLLAFIPTGWGLISIAQVLRPFLHSTWLWESVVSVARLYDIMFGVLVMVPLAFLSWMPGFQSMQTRILFNEAFSRGLRIFQIVTGKKSSD

SEQ ID NO: 113251 - protein, 37 aa, Gossypium hirsutum
  Clone ID: uC-gsflnu33B055c08b1.pep
VCPGVVSCADILVLSAREGIASLGGPNIPLKTGRSDR

SEQ ID NO: 113252 - protein, 144 aa, Gossypium hirsutum
  Clone ID: uC-gsflnu33B055c10b1.pep
LTRPPTRPIRLGAVVITGIILATMFWKLDNSPKGIQERLGFFAFAMSTTFYTCAEAIPVFLQERYIFMRETAYNAYRRSSYVLAHSLISIPSLVILSMAFAAITFWAVGLAGGLSGFFFFFLTIFASFWAGSSFVTFLSGIVSH

SEQ ID NO: 113253 - protein, 89 aa, Gossypium hirsutum
  Clone ID: uC-gsflnu33B055d07b1.pep
MIPFHRKTAKKILQIPLAETDHEHIQVWKEEPFGEFSVRNTYKLLQGANLDPSNYLLQTETTNFYKKLWGLQLPSKITITIWRIRTRRQ

SEQ ID NO: 113254 - protein, 105 aa, Gossypium hirsutum
  Clone ID: uC-gsflnu33B055f07b1.pep
QYVIFIIRVRNFFVVIIAIRVLHYSYRSQHASHNQQQHKAKRHPSRQLLFLPPLLALVTGGQHAGNSSLDLSSVVRSGIFCLAMRERKKKSKKEVGGRFECIRTR

SEQ ID NO: 113255 - protein, 71 aa, Gossypium hirsutum
  Clone ID: uC-gsflnu33B055g05b1.pep
FSIQKFAHPLNRFTIGLLYRKLIIINKTPISCLLCCDSWFVCRWSERCARRRARHAVRHAGTAAARVCCNA

SEQ ID NO: 113256 - protein, 47 aa, Gossypium hirsutum
  Clone ID: uC-gsflnu33B055h07b1.pep
NFPTSSKGNFEEKREGSEGTVKHTQIITSKFPHYFHNLYMCFFGGFF

SEQ ID NO: 113257 - protein, 76 aa, Gossypium hirsutum
  Clone ID: uC-gsflnu33B056a06b1.pep
CLRVREKMAMAKSSNAPILLTKKYNCQNRRPTWAQSPATTAKVLAFICPDVEGRNRSMSATANREARTDIIAHTYS

SEQ ID NO: 113258 - protein, 53 aa, Gossypium hirsutum
  Clone ID: uC-gsflnu33B056b01b1.pep
LMQEGLAYLPAGICMSTMGRHVSYEQAVAWKVLEADESTVHCLAFSFVNWSFV

SEQ ID NO: 113259 - protein, 140 aa, Gossypium hirsutum
  Clone ID: uC-gsflnu33B056b11b1.pep
RENIEEYGRLCRERTNKSMIKNRQIQVIDNDSGVHMRPMPGMVGLISSNPKDKKKTMPVKQSDVKRTLRDRGELEDIMFKLFERQPNWTLKQLVQETDQPAQFLKEILNELCVYNKRGANQGTYELKPEYKKSAEDTAAE

SEQ ID NO: 113260 - protein, 63 aa, Gossypium hirsutum
  Clone ID: uC-gsflnu33B056c02b1.pep
IKNFKSCIEKKKLTFDYIIVLDHITLVFFFLDVQLCIAQICGMKKVVGFFFFYDLLAYTCDPK

SEQ ID NO: 113261 - protein, 119 aa, Gossypium hirsutum
  Clone ID: uC-gsflnu33B056d04b1.pep
KRNKIHHQGEKMNTDRVITFIKAYKAESTSTVKEIATSAGLYNRMWSPPRANTIKCNFDAAYNNYLLKLVMGIMFRDSEGLILALCTYHNPFNTDTTTMEVKTCLQAVTVAEAPSSDGG

SEQ ID NO: 113262 - protein, 78 aa, Gossypium hirsutum
  Clone ID: uC-gsflnu33B056e04b1.pep
QNQNQPSPPSKPIPKTLDSHLPLPILPCCLPPAPLPFSHVVCHKRRSHSPMLSTTSTSPTSDPAHSRVIGAFPSVRRG

SEQ ID NO: 113263 - protein, 104 aa, Gossypium hirsutum
  unsure (1)..(104): unsure at all Xaa locations
  Clone ID: uC-gsflnu33B056e09b1.pep
CKVDGSRIFFLHRSIVHLTQGDATVSSYFTQLKLLWNEYTALVSFSDCACEVAHQNSSHIHQQXLFQFLMGLNETYAAVRSQILLMQPLPSINQAYSMIVQEEA

SEQ ID NO: 113264 - protein, 46 aa, Gossypium hirsutum
  Clone ID: uC-gsflnu33B056e10b1.pep
RSLPLRLAWLSLKRGLIPCLLATENTNPHYAIIIIKHHVESVSLLS

SEQ ID NO: 113265 - protein, 49 aa, Gossypium hirsutum
  Clone ID: uC-gsflnu33B056e11b1.pep
LKLRESLTRVYVQRTGKPLWVVSEDMERDVFMSATEAQAYGIVDLVAVK

SEQ ID NO: 113266 - protein, 107 aa, Gossypium hirsutum
  Clone ID: uC-gsflnu33B056f06b1.pep
FLTKLVALKPGKPVQEMIKNVMLGKDEGADYSDTDEEANASSTRPWGIAGRGTVTGRKPLPVRPGMFLETVTKVLGGIYNGNVSGITAQHLEWVHQKTLQVLLEIAF

SEQ ID NO: 113267 - protein, 60 aa, Gossypium hirsutum
  Clone ID: uC-gsflnu33B056g05b1.pep
KCHKPKKLKQLKQTQSIVVQVEYGCHLRFLFEFYLISCVYIYIYEHVDFTVVCIMETVYD

SEQ ID NO: 113268 - protein, 75 aa, Gossypium hirsutum
  Clone ID: uC-gsflnu33B056g06b1.pep
NLPLPQTKQHRFIFSLGKTKLVNIKTIMRACQYSKYGGGVCYLKQVDVPVPIPKYDEALIKEETYIINPIPLETS

SEQ ID NO: 113269 - protein, 160 aa, Gossypium hirsutum
  unsure (1)..(160): unsure at all Xaa locations
  Clone ID: uC-gsflnu33B056h01b1.pep
LLPEETEEFLGNPTRSIRSFFSDRWSELHLGSNPTKRSTRDQKLLKKEQDVSFVPSRRLENKEIVNIFKKITYLQNTASIHPISSDPGCDMVPKDELGSSNKISFLNKNXFFDLFHLFHDQNMRGYTLHHDFESEERFQXMADLFTLSXTEPDLVYIRDF

SEQ ID NO: 113270 - protein, 29 aa, Gossypium hirsutum
  Clone ID: uC-gsflnu33B056h03b1.pep
VLSCDLRGLTGNVFTWRTGEVITLNIQLL

SEQ ID NO: 113271 - protein, 61 aa, Gossypium hirsutum
  Clone ID: uC-gsflnu33B056h09b1.pep
LKENFGVSRTRALKWNLDKARPFFTFFKLFYFLFWFFIFFFFYFFLIKSTNAITKHCHLSQ

SEQ ID NO: 113272 - protein, 161 aa, Gossypium hirsutum
  unsure (1)..(161): unsure at all Xaa locations
  Clone ID: uC-gsflnu33B057a02b1.pep
VHIQWSGIEXPSKLDWLGLYSPPDSPHHNFIGYKFLSSSSSTWESGAGSISLPLTFLRSNYTFRIFRWTESEVNPEIHDQDHNPLPGTKHLLAESETVGFELGRGPEQIHLALTGREGEMRVMFVAEDPEERQVRYGEKEGEWEGDVAVARVGRYERGDMC

SEQ ID NO: 113273 - protein, 107 aa, Gossypium hirsutum
  unsure (1)..(107): unsure at all Xaa locations
  Clone ID: uC-gsflnu33B057b04b1.pep
PTRPGDMSGQLLWPQSRCSPECSPLPSPRMTSPGPSSRIHSGAVTPLHPRAAGAAAESPTSRPDDGKQQSHRLPXPPIPISKYWPFFFLGILEEPFSSINPKVPGRG

SEQ ID NO: 113274 - protein, 152 aa, Gossypium hirsutum
  unsure (1)..(152): unsure at all Xaa locations
  Clone ID: uC-gsflnu33B057c02b1.pep
VDRLTKYDHLFALLRHFDCKSIAKIMVQGMVKLHGIPRSIVNDRDPIFVSELWTELAQLQGTDLCMSSAYHLQTDGQTEALNXCLEMYLSCMAGDDLEKLPCVSXYWYNTAYQDSAGMTPFKALYGCEPPTIVSYTDGGSSNTQLDHDLNER

SEQ ID NO: 113275 - protein, 101 aa, Gossypium hirsutum
  Clone ID: uC-gsflnu33B057c04b1.pep
SPTSPTILNIFQPKEKRETLGAVRPPPHALPRLLTSQPSASETSDTLLEVLRRTSRGLSSSLPSWWAAKAPSSTSVRRRTKGSPPRVVPVPDSWHGHGGSP

SEQ ID NO: 113276 - protein, 78 aa, Gossypium hirsutum
  Clone ID: uC-gsflnu33B057c08b1.pep
QNLTDYHGITKIVFFFSWNYHRINHPVLNFSIYNLGIVPDSSVGSSLEAANSEVENDGNPPPHTLFQGHFGNDLHKTP

SEQ ID NO: 113277 - protein, 101 aa, Gossypium hirsutum
  Clone ID: uC-gsflnu33B057c11b1.pep
KKGIFTKQIKLGNPKFFPLPRFLKPGPYFYFFVPKKKKLARQPRERKIGSLKRPPQFFFNLFFFFFFFFFFFFFFFFFFFFFFFFFFFFFFPFFFFFFFFF

SEQ ID NO: 113278 - protein, 61 aa, Gossypium hirsutum
  Clone ID: uC-gsflnu33B057c12b1.pep
YCLLGKKTTCDFAVSHHQGRLVGDSAAAPAARVFLVGDSTTVYPRARTGGSFLWKRVKKNT

SEQ ID NO: 113279 - protein, 104 aa, Gossypium hirsutum
  Clone ID: uC-gsflnu33B057d06b1.pep
LTRPPTRPDFLMFGGEPSCSSSDGSYGKEMKQEDHMGFRGFGASLDYGTNNGVNQWIEKQSGHSGECPLDYNPEDVKRLISSNNNCFFIDENDTQDKAMYCYYY

SEQ ID NO: 113280 - protein, 88 aa, Gossypium hirsutum
  Clone ID: uC-gsflnu33B057d10b1.pep
THASGEVLGITRFGIQKMDKSILMLASFEKTGDHLFNASVNGRDDKIEGVTECIIMGIPMQLGTGILKVMQRVDPLPLLQYGADPVLS

SEQ ID NO: 113281 - protein, 65 aa, Gossypium hirsutum
  Clone ID: uC-gsflnu33B057d12b1.pep
SGFRFLSSLFCCLFECSKYLDASSHSIEVQHIVSSNAEVLLFPGFFFFLINPFLLKIDYVSVWFN

SEQ ID NO: 113282 - protein, 139 aa, Gossypium hirsutum
  Clone ID: uC-gsflnu33B057e03b1.pep
PRVRNEPSKDSLDTFREKNASETVLEATRLKELASEQLKLAMAENTYAEKARLEAKKQIEMAELEFASAKRIRQQAQGELEKAQVLKDQATKKISATIIQITCQACKHQFHTSTAAVPADETSLAMSYMSSATTEGEGE

SEQ ID NO: 113283 - protein, 43 aa, Gossypium hirsutum
  Clone ID: uC-gsflnu33B057f01b1.pep
SHASAVVVSIVIFRNPVSVTGMLGYTLTVFGVILYSEAKKRSK

SEQ ID NO: 113284 - protein, 89 aa, Gossypium hirsutum
  Clone ID: uC-gsflnu33B057f05b1.pep
SQRFNLCNGHEGNISEYTQYIRNTHCLKIRKLLLEKVIFVLRFYLLFLPSSFFVILHSKKEKKKRSYLEFRLRIPFYFVEIGVQREFGG

SEQ ID NO: 113285 - protein, 103 aa, Gossypium hirsutum
  Clone ID: uC-gsflnu33B057h05b1.pep
FHASAHASGERDDLLSKPSLNGIPLLVLGNKIDKPESLSKQALTEEMGLKSITDREVCCYMISCRNSTNIDSVIDWLVKHSKSKSGKKQLFLFYSNKKKNHLC

SEQ ID NO: 113286 - protein, 35 aa, Gossypium hirsutum
  Clone ID: uC-gsflnu33B057h08b1.pep
EYYAMIKLSFLLLNFKLHISFCLDVKCFDLYRHHL

SEQ ID NO: 113287 - protein, 59 aa, Gossypium hirsutum
  Clone ID: uC-gsflnu33B057h12b1.pep
FEIKIEINIIITITKLQANNIQTTRQMVAVSFKTKIIQPDIHKTQGNHSFLEIANNNNQ

SEQ ID NO: 113288 - protein, 117 aa, Gossypium hirsutum
  unsure (1)..(117): unsure at all Xaa locations
  Clone ID: uC-gsflnu33B058a09b1.pep
LVLIAGIAAYVKRVSPEVKVIGVEPSDANAMALTMHHGERVMLDKVGGFADGVDAKEVGEETICLCRELVDGVGLVRRDAIRACIKDMFEEKXSILEPAGALLLAXAAAYCTYYGVN

SEQ ID NO: 113289 - protein, 63 aa, Gossypium hirsutum
  Clone ID: uC-gsflnu33B058a10b1.pep
SVAQCLGAICGWGLLKDVKDTYYNSYGGGAKELPDGGNKGRTLDKEDTCAYGCCLQRILRQSS

SEQ ID NO: 113290 - protein, 74 aa, Gossypium hirsutum
  Clone ID: uC-gsflnu33B058b11b1.pep
SINLRKFCEAKDNSLNAKDEEIKMLMKKVEAFSRAMEMESKRVKKETQLVKEKKNGSPKMEDTKKVKNNNCRRS

SEQ ID NO: 113291 - protein, 41 aa, Gossypium hirsutum
  Clone ID: uC-gsflnu33B058b12b1.pep
SVITYSIKSTHVVVNHTSLLYGGSMVNYLTIPTLVIDSHHA

SEQ ID NO: 113292 - protein, 28 aa, Gossypium hirsutum
  Clone ID: uC-gsflnu33B058c07b1.pep
TFLLTKKHKTPKQLQILENFLKFGINKL

SEQ ID NO: 113293 - protein, 82 aa, Gossypium hirsutum
  Clone ID: uC-gsflnu33B058d06b1.pep
MSLTIPSLLGGPRTDVFDPFSVWDLSDEFFNSALANTMSSSSSVREASAIANARVDWKETPEAHVFKADLPGLKKEEVKVEV

SEQ ID NO: 113294 - protein, 47 aa, Gossypium hirsutum
  Clone ID: uC-gsflnu33B058d08b1.pep
GQDFPISYTKRKRCMFQNNFSSKPRTAGRKRLISVAVIYIYLIMVFV

SEQ ID NO: 113295 - protein, 71 aa, Gossypium hirsutum
  Clone ID: uC-gsflnu33B058f01b1.pep
THAHVSCPCGQTRVSSSPFCHSFCTTCTRSFQYTNSIPKDINSFIEGSSYAFTKINNSDYLGLIQNEGLLS

SEQ ID NO: 113296 - protein, 98 aa, Gossypium hirsutum
  Clone ID: uC-gsflnu33B058f09b1.pep
ALHATSFSAYQQDQHRIYVVLYITLKGPFRNFNSTSILRVTKNHFFPSRSENQREKRKRKKAKRRKSNTVTLCFANLRFCYSTHLSVHLFPFFLSLSL

SEQ ID NO: 113297 - protein, 108 aa, Gossypium hirsutum
  Clone ID: uC-gsflnu33B058g03b1.pep
INKKYGGEYVKKCMEKKKENLISMANLRFSDENPSAVAAAAAAAAATSFGGSIFDMATGAGACDGDTKWGSSLGHGLAWHPSRFHCPFFIRFLSATTDFFTTTSLNII

SEQ ID NO: 113298 - protein, 160 aa, Gossypium hirsutum
  Clone ID: uC-gsflnu33B058g12b1.pep
IAYDPTANVVYTGCHDGWIKRVRLSDSVVENFVNTHGRPLGLALGHNKEIIVADAYKGLLNISKDGEVELLTDEADGHKFKLTDGVDIADNGMIYFTDASYKYNLNEDIWDILEGKPHGRFMSFDPVTRKTDVLVSHLYFANGVAVSPNQDHAFFCETVM

SEQ ID NO: 113299 - protein, 118 aa, Gossypium hirsutum
  Clone ID: uC-gsflnu33B058h02b1.pep
IFYRVRIKMVGVAFFGPYAAAPHENTGQGAWDPEEEEPYLDPTWAHLQIVYELLLRYVVSSDTDTKVAKKYIDHSFILKLLDLFDSEDPREREFLKTIFHRIYGKFMVHRPFIREGDN

SEQ ID NO: 113300 - protein, 59 aa, Gossypium hirsutum
  Clone ID: uC-gsflnu33B058h03b1.pep
HPPNSQPNHISFHLFYAPTMEFSCDRREWSTAPIIYFPIFISMDLMKHYFLFGTCWSSF

SEQ ID NO: 113301 - protein, 68 aa, Gossypium hirsutum
  Clone ID: uC-gsflnu33B058h08b1.pep
PFRGFGGVKRCIFLQNEGMTKIFVFNLGARIGEPSISREGLVGLVQMGRRGFLIGFFFFRIRGSFPCF

SEQ ID NO: 113302 - protein, 97 aa, Gossypium hirsutum
  Clone ID: uC-gsflnu33B058h09b1.pep
FLYLDIKFVICFASQGRGLSRKLHRVVNDIIAKAMAAFAATGMDPYGVLPDDEWFNEICQDAIERLSGKSKADRDLNSPTASVSAQSISSVRSHGRY

SEQ ID NO: 113303 - protein, 98 aa, Gossypium hirsutum
  unsure (1)..(98): unsure at all Xaa locations
  Clone ID: uC-gsflnu33B058h10b1.pep
FSRPATRTYGLGCVKASLVQLITTLEVRGGALGLAIAXYNKLTSDATLYPDGLVDIAVCHGYGIFVAGVIGANIXGGHVTPGVTYWVSILQGQIHSLR

SEQ ID NO: 113304 - protein, 65 aa, Gossypium hirsutum
  Clone ID: uC-gsflnu33B058h12b1.pep
LEQQTEAHTCGGAARARRAVIFLLQRLKGSRNPKVSGTLFRSGLIGLSWVLGFESGLGIVLGLGI

SEQ ID NO: 113305 - protein, 75 aa, Gossypium hirsutum
  unsure (1)..(75): unsure at all Xaa locations
  Clone ID: uC-gsflnu33B059a10b1.pep
XXGGKKIKKSKTYFNYSTQFDWFDGKFSFVRLPHNFDRYMLRLFLWLRTGENVGPWFNFQVIYNYVGFEVKKHYT

SEQ ID NO: 113306 - protein, 98 aa, Gossypium hirsutum
  Clone ID: uC-gsflnu33B059a12b1.pep
LSDSKIRGRFARMVVYINFDKPLIAQVLVNGMNQRVEYEALPTICFTCWKHGHTKELCASLQSELAPEKDQMNVTPTEVGKGGEGVVYGPWMVVKRKA

SEQ ID NO: 113307 - protein, 112 aa, Gossypium hirsutum
  Clone ID: uC-gsflnu33B059b09b1.pep
LWDTPGFSLSPLFKTGPRIFFLWPHKKNISSHTPASKHGSSIKGPPLFFFFFFFFFFFFFFFFFFFFFFSFNSFKIYFFVFVKTKKEIISPIYSVDEESNYHYIYSFFSDAR

SEQ ID NO: 113308 - protein, 148 aa, Gossypium hirsutum
  Clone ID: uC-gsflnu33B059b12b1.pep
FRVRPRVRSELDITDQDVTKIADMIDGEIASLVPEWKRGLGIDENSICTGSSFCQNCALNGHLSDFLSSSSAGAKNLQVLECWKHGCTTVHGRFEEITYQVGEPEQCVSEGVEASLSQPDGIHYADIWGQREGSELIPPGPKDICCTK

SEQ ID NO: 113309 - protein, 189 aa, Gossypium hirsutum
  unsure (1)..(189): unsure at all Xaa locations
  Clone ID: uC-gsflnu33B059c01b1.pep
GCVSHFFHRAIKAYNTGTRKRRKIHGDDFGDVRWHKTGRTKPVFLDGVQEGCKKIMVLYMTTVKGGKSEKTNWVMHQYHLGTEEDEKDGEYVISKIFHQQQQPKQGDKTEQDLPETTDTMIVKVDPVTPKSVTPDPPRTGRQCDEYDQGQEYTIPCINPSAQVFSAXHPTTQYVEDEAQAECENSVLMI

SEQ ID NO: 113310 - protein, 151 aa, Gossypium hirsutum
  Clone ID: uC-gsflnu33B059c05b1.pep
PRVRPASLAVSCSSMQCKSSNLMLGNVTVQQSSAGCNVTSCAYSGYANGTIITSLSSSLQPRCPGPQQFPPLVAPPTYVTRDSVFAPAPAPQSDGATTATVPKTSTVPKTSTVPSTGSLPGFPPGGAPFGSLSNASTLMNSAALPAALVIY

SEQ ID NO: 113311 - protein, 114 aa, Gossypium hirsutum
  Clone ID: uC-gsflnu33B059e06b1.pep
AQCHAHDQHHCVYPCHKAWSEIRHHIWPSLCKAINARLYSIQIYAPHIWYPHGGTLSALWLGLRRAFRVHRLTITVVFRDPSVSMICNHVPQSGMSHGLACHILGSDFGLSDQS

SEQ ID NO: 113312 - protein, 61 aa, Gossypium hirsutum
  Clone ID: uC-gsflnu33B059e08b1.pep
LSSRNEKDSGKPNPVRMTVALVILGVVCLVGLLLTYFLTRETTGRSLEDNEIYEDELIYNT

SEQ ID NO: 113313 - protein, 37 aa, Gossypium hirsutum
  Clone ID: uC-gsflnu33B059e12b1.pep
EHALKVDTLPDDPSSDDMLILYGLYKQATVGPGNTRK

SEQ ID NO: 113314 - protein, 96 aa, Gossypium hirsutum
  Clone ID: uC-gsflnu33B059f05b1.pep
LSSAHASGKSLICLLASLFFFLLPTNRVWDLGICDWEFQVTKFPAKAWEKMTDYEEPRYQGNGDNLENSYGGGSSPKSRSDDQNDSKYQDYERESS

SEQ ID NO: 113315 - protein, 95 aa, Gossypium hirsutum
  Clone ID: uC-gsflnu33B059f06b1.pep
KHSTTLSSLRKQPIYFGVSSLKEPNPTTALKPLYTNHIASIQLPRMYIRGILIITEHIYTNLVVAKLLLFGYWNLLKQLHIEHQEITVVDPDTDP

SEQ ID NO: 113316 - protein, 60 aa, Gossypium hirsutum
  Clone ID: uC-gsflnu33B059f12b1.pep
SCKPGLVKFVPLKRPPHFFFFFFFFFFFFFFFFFFFYFFFFFFFFFFFFYAFYLIYLENK

SEQ ID NO: 113317 - protein, 176 aa, Gossypium hirsutum
  unsure (1)..(176): unsure at all Xaa locations
  Clone ID: uC-gsflnu33B059g04b1.pep
PRVRLSSSSSVPYPSVADWWDTVRLYTDQTGSNITATISISGEFYDSGYSHGVYLSRLSMQSIIKAAVTSHLRLLPLNPHNGLYLVLTSQDVQVEDFCRAVCGFHYFTFPILVGVTVPYAWVGYSGTQCPGMCAYPFAWPKYSXKPPPNGGNDITHAPNXDAGVDGMISVIAHELA

SEQ ID NO: 113318 - protein, 45 aa, Gossypium hirsutum
  Clone ID: uC-gsflnu33B059g06b1.pep
LSRGVGLNYICRYEQQQNALLDCASSFDFEDCMEWQMKYGNLYID

SEQ ID NO: 113319 - protein, 73 aa, Gossypium hirsutum
  Clone ID: uC-gsflnu33B059h02b1.pep
PLIPVMLSAVVCSTCVVSAMRHYVLVMPGLIRRVSDDSRRLYSQPHGLRIIPLLWSGLPSLRAELSIILLGAW

SEQ ID NO: 113320 - protein, 86 aa, Gossypium hirsutum
  Clone ID: uC-gsflnu33B059h04b1.pep
HNTSHTRLRERVCYIASSAPTTGALAGHSPVQRLVIRVASASIASSLASSSDSFRHELAHGTVAGMSVPPSFMPSCMNHCFHSRYL

SEQ ID NO: 113321 - protein, 127 aa, Gossypium hirsutum
  Clone ID: uC-gsflnu33B059h08b1.pep
VSDSSSDNRGSATSSSASSSDTSYSSLPSNPSLQTLPSVPSLQLFPDTLVFSVSDISVSSIMPLPNHPITCVAVQGNYLYVASVNEISVYDRQTYTLVDAYNGNDSSYGSVKSVTVCDGNVFTAHQD

SEQ ID NO: 113322 - protein, 45 aa, Gossypium hirsutum
  Clone ID: uC-gsflnu33B060a07b1.pep
LINIDNLLINAPTYSYSFNRCTSTLTHAIPLLHEAARSSRCFSIP

SEQ ID NO: 113323 - protein, 47 aa, Gossypium hirsutum
  Clone ID: uC-gsflnu33B060b03b1.pep
WPRGLQSCVLRPLQWPWISAQAFGCCGVFRAFLKTHIVLRVLERSQG

SEQ ID NO: 113324 - protein, 76 aa, Gossypium hirsutum
  Clone ID: uC-gsflnu33B060b05b1.pep
LTRPVACSAWEVFKLEMKSGTTISLPEKEGATLTIAVLLVSVSTDGIILIFPLIFPLFFSIHLPSFDPCFHLYHHL

SEQ ID NO: 113325 - protein, 31 aa, Gossypium hirsutum
  unsure (1)..(31): unsure at all Xaa locations
  Clone ID: uC-gsflnu33B060b08b1.pep
XDPPKSSLTDFSTFADLNLCLRDRVYRDSKH

SEQ ID NO: 113326 - protein, 48 aa, Gossypium hirsutum
  Clone ID: uC-gsflnu33B060c06b1.pep
HASAHASAHAFVHASGYLAELKDGDERKAETVDRISSDKVLKNFSFGV

SEQ ID NO: 113327 - protein, 69 aa, Gossypium hirsutum
  unsure (1)..(69): unsure at all Xaa locations
  Clone ID: uC-gsflnu33B060d12b1.pep
TRRRADAHYVVCFYAGAIIIGNNGEVMPGQWELQVGPSGGISAGDQIWMARDILPCITPIXRPGQXFDA

SEQ ID NO: 113328 - protein, 60 aa, Gossypium hirsutum
  Clone ID: uC-gsflnu33B060e06b1.pep
QILYRQKQIQMKFSVTSCRNNALECFNHASQPTSYGWKGDVCLNLSGVSYVRIATYTSKF

SEQ ID NO: 113329 - protein, 41 aa, Gossypium hirsutum
  Clone ID: uC-gsflnu33B060e12b1.pep
VGACSRSVLCARTVVGPCFVGYKRLGGLKKPPLAYRLGNNR

SEQ ID NO: 113330 - protein, 116 aa, Gossypium hirsutum
  unsure (1)..(116): unsure at all Xaa locations
  Clone ID: uC-gsflnu33B060f02b1.pep
MKLSASEDDLGSDIHVPADIDWHMLDKSKFFFLGAAFFSGASAGLYPAMVLKTRQQVSSTQISCFKMSFSIMRCEGLRGFYRGFXGTTLMGTIPAXALYMGALEVTKTSVGRSTVR

SEQ ID NO: 113331 - protein, 49 aa, Gossypium hirsutum
  unsure (1)..(49): unsure at all Xaa locations
  Clone ID: uC-gsflnu33B060f07b1.pep
AYLKRIFRDLFICEGFQSDYGLDWTMLRGKQGHXTTPPARALGTGGGTS

SEQ ID NO: 113332 - protein, 49 aa, Gossypium hirsutum
  Clone ID: uC-gsflnu33B060h08b1.pep
VDRRKGFKFTALWELMSKDCRYRSFCRKRRPPSLGMGGVVLGCLSREHA

SEQ ID NO: 113333 - protein, 88 aa, Gossypium hirsutum
  Clone ID: uC-gsflnu33B061a05b1.pep
PTRPDSSLCVLPINQSSPTSCFLLFLPSLFFLSYIVSRSSLCQAFTFLCFALLFCVPHCLCVYSPKVHVSSNPTTFHFTPLLGPSKGF

SEQ ID NO: 113334 - protein, 40 aa, Gossypium hirsutum
  Clone ID: uC-gsflnu33B061a11b1.pep
AKKLLLLTKPSPVILELDPLYPLCSRSCLHYPCQNATNFT

SEQ ID NO: 113335 - protein, 33 aa, Gossypium hirsutum
  unsure (1)..(33): unsure at all Xaa locations
  Clone ID: uC-gsflnu33B061b05b1.pep
TYSVNQPGVLIQVCEGERTXSGDNNLLGKLELC

SEQ ID NO: 113336 - protein, 60 aa, Gossypium hirsutum
  Clone ID: uC-gsflnu33B061b06b1.pep
KKKKKKKREGNLKKKGSKQNNWAAGLADPRLLNPGMRRCKYKIVRPQLIKLVAAIRGPNW

SEQ ID NO: 113337 - protein, 79 aa, Gossypium hirsutum
  Clone ID: uC-gsflnu33B061b10b1.pep
AFFWFSLILSCFCFLVWDMSVFHFASWVFGLNFKNYALNGRKFLAKREETCFFIVYQSRAGLSFLYVCRERVEFLLFSL

SEQ ID NO: 113338 - protein, 87 aa, Gossypium hirsutum
  Clone ID: uC-gsflnu33B061b12b1.pep
FEAPWTWNGRIWARTGCNFNSNWQPACETGDCDGRLQCNGLIGIPPATLVQVALQGDKGKPNFYDVSLVDGYNLPVSVTTRPFSPKC

SEQ ID NO: 113339 - protein, 105 aa, Gossypium hirsutum
  Clone ID: uC-gsflnu33B061c02b1.pep
LCIMGSNRFLVYEYMQKGNLQDHLNGIGETKMDWPSRLKLALGAARGLAYLHSSSAVGIPIVHRDFKSTNVLLNANFEAKISDFGLAKLLPEGQETSVTARFLGT

SEQ ID NO: 113340 - protein, 64 aa, Gossypium hirsutum
  Clone ID: uC-gsflnu33B061c05b1.pep
PTRPNPSNFLGPNLQLNPLVYGTIYAFPFMSSLYGSSFLFVSCFNSHYSIKQCSRSTFPWILPK

SEQ ID NO: 113341 - protein, 54 aa, Gossypium hirsutum
  Clone ID: uC-gsflnu33B061c06b1.pep
SMSNSVNRARLYVVIQSFRLSLFLGPAFPRNLILPCICHRQQITPRTCGRTRGK

SEQ ID NO: 113342 - protein, 170 aa, Gossypium hirsutum
  Clone ID: uC-gsflnu33B061c07b1.pep
PTRPVPKLTEYLQKHWRDFRKPESAVMRPLYDEVVYLNEHHKRKLRQEFGVVPWSFEQNLGQAVFLPAGCPFQVRNLQSNVQLGLDFLFPESVGEAVRLAEDIRCLPNDHDGKLQILEVGKISLYAASSAIKEVQKLVLDPKLGAELGFEDPNLTSAVSENLEVVKRSQI

SEQ ID NO: 113343 - protein, 94 aa, Gossypium hirsutum
  Clone ID: uC-gsflnu33B061c08b1.pep
RRLTLVPAGTAGGRERTLGHPSPRRMHQLYIPSTEASLYSTTKAQVFPRIDHTKIRPLTAYQGHMDVMTHPCPRGQRSLMYAQGEGDMRRCNYA

SEQ ID NO: 113344 - protein, 120 aa, Gossypium hirsutum
  Clone ID: uC-gsflnu33B061d04b1.pep
VLCDADVVGYVHERPFVSCWHVSALRCGALRMSMRHSCIPHVSRYTGISYCPVAPCVSFLMVVTISGLLVDALHLHLGTGHVSSSWCFCASAAMVSVFLTFNRRRVLHHACSTVKSWGLS

SEQ ID NO: 113345 - protein, 113 aa, Gossypium hirsutum
  Clone ID: uC-gsflnu33B061d12b1.pep
LRVRKCTPCQQQVPSPPPPSPPPPASSPPPPANNPNYCPPPPSPPTSSGGGSYYYSPPPPAQSGGNNNNNYAPPPPGGVIGGMYYPPPTYKNYPTPPAENPIAPYFPFYYHTP

SEQ ID NO: 113346 - protein, 115 aa, Gossypium hirsutum
  Clone ID: uC-gsflnu33B061e02b1.pep
PRVRKMVVKVTMKGEKSRSKALKIVVGLSGVESASLKGDDKSQIEVTGDGVDAVKLTSLLRKGVGYAELVSVSAADKKDDKKDETKLPPPFYYYQCQPVPPYGYVENYGPSCYIL

SEQ ID NO: 113347 - protein, 151 aa, Gossypium hirsutum
  Clone ID: uC-gsflnu33B061e03b1.pep
HAVLDACPNAYMSIVFSYMAIMHGYTWSLVYIVGAKPFMPQMCCNPSGFSICHQWPFPKNAVLCGLGACALEATPLPVLDQSPSYLPTINSYKNTSRASQPLSQPFNARGMGRPGYICLADGLYASSPSSFMSLKVRALDPSTISVAGRVG

SEQ ID NO: 113348 - protein, 163 aa, Gossypium hirsutum
  unsure (1)..(163): unsure at all Xaa locations
  Clone ID: uC-gsflnu33B061f04b1.pep
LRIVNWDXVLRTAIYDIEVDYTDIKERTLLKVPSYEKPVEFGVLTSFAYPLEGELGEIVVATTRVETMLGDTAIAIHPEDKRYSHLHGKFAIHPFNGRKLPIICDAILVDPTFGTGAVKITPAHDPNDFEVGKRHNLEFINIFTDDGKINSNGGADFVGMPRF

SEQ ID NO: 113349 - protein, 116 aa, Gossypium hirsutum
  Clone ID: uC-gsflnu33B061f06b1.pep
GFIMGRTADGTAGACGREENGHGSEIFTCSYASSSDAMLILRREMRTQLWFRTNEWLLQPVHNLMAFEHLMLASLFLHYFIHRLEICILQHRTNQHKGVQMLHLRTERRLIFRTMD

SEQ ID NO: 113350 - protein, 46 aa, Gossypium hirsutum
  Clone ID: uC-gsflnu33B061h08b1.pep
GISDGGAEGHFMVLRVNIQGVTKPGIRRLAPRGGVTDFSGMGFIFP

SEQ ID NO: 113351 - protein, 69 aa, Gossypium hirsutum
  Clone ID: uC-gsflnu33B062a01b1.pep
IESLAWKVVKNKGGRKGVGQLTGSSSSIIFWSSTVQSLEGCVLFAGRLQHIRSEYMIPSPPPIEAKGRG

SEQ ID NO: 113352 - protein, 155 aa, Gossypium hirsutum
  Clone ID: uC-gsflnu33B062a09b1.pep
FTFGIAFGSRQSFFFDSSFQLSPCDRRLSLSNSNSPVALFRPKVDEISLLTINGSSFSPDSVGGYMVAFSGRKYAARSLPAFVANSSYTVTSFTLVLEFKKGRLQNLFWKRDGMCSMLRKFNFVCLNKQNCAINTSSCKNHGGSVDCSLGIQLAF

SEQ ID NO: 113353 - protein, 107 aa, Gossypium hirsutum
  Clone ID: uC-gsflnu33B062b02b1.pep
MCNNMTWSPSHPILVSSKRRHRSKQSKVQIYRLSRKRCEEEDVKKDMELMNLKLYLENRSIIEENEKLRERANLLHQENLALMSELQNKFPHLDRFSTTLLVLLQKH

SEQ ID NO: 113354 - protein, 151 aa, Gossypium hirsutum
  unsure (1)..(151): unsure at all Xaa locations
  Clone ID: uC-gsflnu33B062b03b1.pep
VVCYPFLTKQGSVMASPEVGRDKSPFMLQPKSLPSPVSKSSKTSSFNAQIILRVFAAAFTLAAICIMTTSSQSFPLLGFTIKAHYSDSSAMRFLLVTDATVCAFSVLXALFGYRLSRSGSDLKYCFYLFLHDMVIMGLATSGCSAATAVGY

SEQ ID NO: 113355 - protein, 69 aa, Gossypium hirsutum
  Clone ID: uC-gsflnu33B062c02b1.pep
CLPAYYLSARFEDMEHSKPETTVISIKNAIMTFKMKKIKAIISFPLPPLVFFDNHFCFPFENCQVRKKR

SEQ ID NO: 113356 - protein, 123 aa, Gossypium hirsutum
  unsure (1)..(123): unsure at all Xaa locations
  Clone ID: uC-gsflnu33B062d02b1.pep
MEGARELIRQSHCSCFYIDSQPMSHTGGEVSSQNMTQTDDIGYDAILVLLSMAVFILGVVLIIIICRKKPQKPDQKQLELPAKFCASSYQLTDIDAATDGFNPRRXIVGKGRLGTVYAAISPS

SEQ ID NO: 113357 - protein, 56 aa, Gossypium hirsutum
  Clone ID: uC-gsflnu33B062d09b1.pep
FPSHASLLASPFADPPPVSICSFNTLERAKSRNSRVGYCALEPIKISNRPASFSPN

SEQ ID NO: 113358 - protein, 147 aa, Gossypium hirsutum
  Clone ID: uC-gsflnu33B062e01b1.pep
DFLYLGSYDNASRSELLKTQGITRVLNTVPACQNLYRNSFIYHCLQDDKILQFDDAIQFLEQCEKDKARVLVHCMSGKNRSPAIVIAYLMRSKGWRLPQSYQWVKERRSSVELSQAVYQQLQEYEQKLFRSSGSINPSLPAFPPTAG

SEQ ID NO: 113359 - protein, 114 aa, Gossypium hirsutum
  unsure (1)..(114): unsure at all Xaa locations
  Clone ID: uC-gsflnu33B062f02b1.pep
VISWTTIISALAFHGLGTQALDVFSRMEMAQVKPNDITFIAVLSACAHVGLVDLGRYYFHAMKYRYGIQHEIQHYGCMIDLLGRAGYLAEALKLVSEMPFQPNAAXWGATSCCL

SEQ ID NO: 113360 - protein, 41 aa, Gossypium hirsutum
  Clone ID: uC-gsflnu33B062f07b1.pep
FSFDFFKKSLTLIIYTCNLLFFVILLFFVPCYLKKNERINR

SEQ ID NO: 113361 - protein, 37 aa, Gossypium hirsutum
  Clone ID: uC-gsflnu33B062f09b1.pep
REAMITPLALSLSKIKGRFPLHGTWPWMVKPHPEIIY

SEQ ID NO: 113362 - protein, 38 aa, Gossypium hirsutum
  Clone ID: uC-gsflnu33B062f12b1.pep
NIELQNILKIIKNFNVFIIFIIYANVYKNSKIILIYSN

SEQ ID NO: 113363 - protein, 115 aa, Gossypium hirsutum
  unsure (1)..(115): unsure at all Xaa locations
  Clone ID: uC-gsflnu33B062g02b1.pep
LVNSFKTTDGRGVIVHIENGACITIXYPTNVIVYGLHIHDLKRTGNAMVRSXPTHSGMGTMADGDAISIFXGEATFEFGHKSLSNWADGQVVAYMGSTAITISNNXLTHHNGVML

SEQ ID NO: 113364 - protein, 74 aa, Gossypium hirsutum
  Clone ID: uC-gsflnu33B062g07b1.pep
CLPLSTITGVFGMNVGGVPWTVQKDPALKDGFRNVMVLCLAMLILVLLCFIFPALYSRLYAWRQRRSLLKILVV

SEQ ID NO: 113365 - protein, 106 aa, Gossypium hirsutum
  unsure (1)..(106): unsure at all Xaa locations
  Clone ID: uC-gsflnu33B062h01b1.pep
SAFAILIFGQDLPDGNYQRLQNSGNKQKDKFSRVFYHGITNYRGWILALTYGYCFGVXELTVDNIIAEYFYDRFNLKLHTAGIIAASFGLANLVSRPAGGVLSDMR

SEQ ID NO: 113366 - protein, 32 aa, Gossypium hirsutum
  Clone ID: uC-gsflnu33B062h09b1.pep
SYQTIRKCLAIRLSLIYVGFSKSRFCSKGYIE

SEQ ID NO: 113367 - protein, 49 aa, Gossypium hirsutum
  Clone ID: uC-gsflnu33B062h11b1.pep
LKRIIESIAKIVLFGNVKTGILFYFADSLKSVPLRHLLEVPSLDNKGYP

SEQ ID NO: 113368 - protein, 64 aa, Gossypium hirsutum
  Clone ID: uC-gsflnu33B063a01b1.pep
IPNYGFFFFFFYFLKKGRPAYSIGRPFRLVYRCLTAATCCPVQLAEPSVPPVRPRASGRVGGRE

SEQ ID NO: 113369 - protein, 102 aa, Gossypium hirsutum
  Clone ID: uC-gsflnu33B063a03b1.pep
MENLKGRMRICGHGPQNGPRMLVFRPFRWPGSNELPPYAGTNDIGVYDDCMVIGSLHTDFAHMFYHGRTDRVHYVTYGNDVVEANTQVGGGLIGIQIDGSHE

SEQ ID NO: 113370 - protein, 160 aa, Gossypium hirsutum
  unsure (1)..(160): unsure at all Xaa locations
  Clone ID: uC-gsflnu33B063a04b1.pep
SLFPTTTLKDLFLLIHYPTKQLIRRLSRVADASSQYSLLSSDTDSTRHRITRRAESFRIAVASLKKPVRRSVPDGHVPVYVGEERTRFLVNAELLNHPVFVSLLNKSAQEHGYDQKGSLYIPSHVLVVERVMDALRLVADLRDPQDXLCSSSTTGFSIYK

SEQ ID NO: 113371 - protein, 66 aa, Gossypium hirsutum
  Clone ID: uC-gsflnu33B063a06b1.pep
SIRQATGYLKQHRSHCVLEDTIEGLRSMPHLSAPPLQPPHTLLLPLSSHGEKALKSISFCSTNPLV

SEQ ID NO: 113372 - protein, 77 aa, Gossypium hirsutum
  Clone ID: uC-gsflnu33B063a12b1.pep
SSHACEKKNKGGFTEKERWITKTNYFDRGGSSLRTQACYAGLQTDFSFIGAPNFNLLAGILHHVDWEILEVARFFTP

SEQ ID NO: 113373 - protein, 66 aa, Gossypium hirsutum
  Clone ID: uC-gsflnu33B063b09b1.pep
YKPLMFLLCFFFVLFFSILTCVVIHIANVHNINKGRPFLKTCNFLFEVKPCSALMLQKPGSELYTC

SEQ ID NO: 113374 - protein, 71 aa, Gossypium hirsutum
  Clone ID: uC-gsflnu33B063c06b1.pep
EEWGVDGYGSMKGLIRLRSPEAGHDDEEDDDGGNGGGSSDHPVDSHVEAARHFFSELGNYEGESSLFWVYK

SEQ ID NO: 113375 - protein, 40 aa, Gossypium hirsutum
  Clone ID: uC-gsflnu33B063c12b1.pep
LGGPNITLKTGRRYGRRCCTNAVEEYLPYHNETISGVIDK

SEQ ID NO: 113376 - protein, 112 aa, Gossypium hirsutum
  unsure (1)..(112): unsure at all Xaa locations
  Clone ID: uC-gsflnu33B063d04b1.pep
LICKHISFSALHIVLLYDSTPTSTAGYDALDPTGTITIKRDACRWTPNGYVAVVTMYNLQQXSGILAPGWTLXVTWAKKVVICSMMXSHTTEQGDRSXDKGNVPDCCQKDPT

SEQ ID NO: 113377 - protein, 60 aa, Gossypium hirsutum
  Clone ID: uC-gsflnu33B063e04b1.pep
GAPEKKKDPASTREGTRGPQSRPAPKKLFFLFFCFFCFFFFFLFFFYFFFFFFFFFFFIN

SEQ ID NO: 113378 - protein, 50 aa, Gossypium hirsutum
  Clone ID: uC-gsflnu33B063f04b1.pep
RGTIWVLNGWSVRQVTNLIRANEHPHLVMWCSFTDQKMRQTMLNEASAPI

SEQ ID NO: 113379 - protein, 178 aa, Gossypium hirsutum
  unsure (1)..(178): unsure at all Xaa locations
  Clone ID: uC-gsflnu33B063f12b1.pep
MHFQQINVTQIIFIPRNDNPTTMMNFSPISLCNVLYKIKAKTIANKLRGAINNXIDGAQSAFVRGRLISENILLAYEILHTLKQKRXGNKGLMVVKLDMSKAYDXVEXNFIKEMMARMGFHKRVIGILMKCLTTVSYLVVNRCIGESFQPSRXLRQGDPLRPFFFSFVXEGLSCLMRL

SEQ ID NO: 113380 - protein, 84 aa, Gossypium hirsutum
  Clone ID: uC-gsflnu33B063g09b1.pep
SSFSHVDSPSSVSLSSSLMVMVVSFSSPCLVRCDVWPFTHLSIAMGSGFEGHIGMKNGILTRTVWLALGVRTARIVNRNKLLRM

SEQ ID NO: 113381 - protein, 112 aa, Gossypium hirsutum
  unsure (1)..(112): unsure at all Xaa locations
  Clone ID: uC-gsflnu33B063g12b1.pep
VKKEEXXXXFFSNNIAHCYYLSTPRTNFFSHSQLNLFTEMNATKITKLINPLQHATKQIENDEKKNQHEDPFRVSRFSRFKHHSKTRTVVKTLKAVTTSHDRTSMMIQQPGF

SEQ ID NO: 113382 - protein, 67 aa, Gossypium hirsutum
  unsure (1)..(67): unsure at all Xaa locations
  Clone ID: uC-gsflnu33B063h02b1.pep
SVDEEDDEQGATCGSCGDSYGTDXEFWIRXDICERWFHGTCVPEAPAQAVHITQYKCPSCSSKRARV

SEQ ID NO: 113383 - protein, 74 aa, Gossypium hirsutum
  Clone ID: uC-gsflnu33B063h05b1.pep
LRKFMKLHRQQTSPQEAEIYIHAMQTRCRYHPFSSLPDSDKLVGTMSGPMSPFHLSLAVLVRRTRGRTRGRTRR

SEQ ID NO: 113384 - protein, 55 aa, Gossypium hirsutum
  Clone ID: uC-gsflnu33B063h09b1.pep
MCWRKQTVEKKEDDKKKESDHIAELVKAYKAHNAHMTTYYRVVSAEENPFSSFIR

SEQ ID NO: 113385 - protein, 103 aa, Gossypium hirsutum
  Clone ID: uC-gsflnu33B063h10b1.pep
INPQPKQNLLSCLTPFGERLIHFFAVANLIQLKQHCLSSLPRAILARRTLPIPPTKHILTVLDCTQRFTWLAWLMNTHQSCPILLFSCKPFPPIHCFNCPPLH

SEQ ID NO: 113386 - protein, 54 aa, Gossypium hirsutum
  Clone ID: uC-gsflnu33B064a02b1.pep
KRTTYGSSIYKNLTSPHFLVKEKLSQRLKERLTKLQQRRTIETLHALTGGCSKV

SEQ ID NO: 113387 - protein, 145 aa, Gossypium hirsutum
  unsure (1)..(145): unsure at all Xaa locations
  Clone ID: uC-gsflnu33B064a05b1.pep
PRVRQNLRLAYLRSLESLDLVKQIEVSEFLFSGDIAALIYLCNPFTIVACVGLSTSPIENMAVILCLYGACSRLIPLAAFGWVIATHLSLYPAILIIPVIFLLGCGPDSPPRKLFLQRHQXKEVLNQSKLPSSFSWGPVIHFAFW

SEQ ID NO: 113388 - protein, 30 aa, Gossypium hirsutum
  Clone ID: uC-gsflnu33B064a10b1.pep
FPTCLCFMVSKCVAMQQFNHVCTAAIIVLD

SEQ ID NO: 113389 - protein, 39 aa, Gossypium hirsutum
  Clone ID: uC-gsflnu33B064d06b1.pep
DLLLYTQWRMNCFNHRVLLLTLLLPIVVILVEGQGTRVG

SEQ ID NO: 113390 - protein, 31 aa, Gossypium hirsutum
  Clone ID: uC-gsflnu33B064d10b1.pep
QSHLKLKNLSSNLQQVGGKTQQEDLHFTVKG

SEQ ID NO: 113391 - protein, 122 aa, Gossypium hirsutum
  Clone ID: uC-gsflnu33B064d12b1.pep
AALRWLGAGNGSRALSFVGGNGSSKSVSSAGRIGSLGSSSPSNSMTNTNFDGKGTYLIFNVSDSIFISDLNSQDKDPIKSIHFSNSNPVCHAFDQDAKNGHDLLIELNSGDVYSVSLRQQLQ

SEQ ID NO: 113392 - protein, 91 aa, Gossypium hirsutum
  unsure (1)..(91): unsure at all Xaa locations
  Clone ID: uC-gsflnu33B064e11b1.pep
MAHLSGVTTGLTLTESISMVAAKRSKQIHMHGHHVKCQTLNNALMIISDRTQTVLSQLPTXDKLSWLSILAAVMTVTYASIGLGLSIDKAA

SEQ ID NO: 113393 - protein, 36 aa, Gossypium hirsutum
  Clone ID: uC-gsflnu33B064f02b1.pep
PYSLLIMLAGSLFLGAFLGWIYLHTRNEKICWLVMR

SEQ ID NO: 113394 - protein, 80 aa, Gossypium hirsutum
  Clone ID: uC-gsflnu33B064f03b1.pep
HLRYLSQHLEKPAPGYFIYVPRINTNAVVSMREKLGLFTHSRAQICQLDCAQYPNLQHLNHVILPSFNDHPFRTRMRTRE

SEQ ID NO: 113395 - protein, 46 aa, Gossypium hirsutum
  Clone ID: uC-gsflnu33B064f08b1.pep
HGLRCRRHVHDMVLHWLSSIDANAMSQIGFTLTRSKVTPCPRQVLH

SEQ ID NO: 113396 - protein, 45 aa, Gossypium hirsutum
  Clone ID: uC-gsflnu33B064f11b1.pep
PMLLAIPIIVHLVEVEAFFALSFSRGCRVFPAIRPLARHTSGRVL

SEQ ID NO: 113397 - protein, 79 aa, Gossypium hirsutum
  unsure (1)..(79): unsure at all Xaa locations
  Clone ID: uC-gsflnu33B064g04b1.pep
STRPDTDMVDDLLAFYSEEAKVNESEDLXNSINLTKDNIKAIIMDVMFGGTETVASAIEWALTEMMKSPEDLKRVQQEL

SEQ ID NO: 113398 - protein, 129 aa, Gossypium hirsutum
  Clone ID: uC-gsflnu33B064g07b1.pep
FTLTDFDLSRSLKKKQLSETVADLKMDPNLSPAIPVRRNFIRWVPAVADNKYRKAYKKPKPARVSPVSRRKPSFSNGERSNSFVGTEEYVSPEVVRGDGHEFAVDWWALGILTYEMLYGATPFKGRARG

SEQ ID NO: 113399 - protein, 57 aa, Gossypium hirsutum
  Clone ID: uC-gsflnu33B064g09b1.pep
LICLLMPGQQVIQALNYNPGDSWRLLKQEVHLLDYHMGSEKLCKLFYSAGILLVVQG

SEQ ID NO: 113400 - protein, 142 aa, Gossypium hirsutum
  Clone ID: uC-gsflnu33B064g11b1.pep
YLDARDPQGTRCFYSERLLKQHCIHKHMILLLNKCDLVSAWATKGWLRVLSKEYPTLAFHASVNKSFGKGSLLSVLRQFARLKSDKQAIFDGFIGYPNVGKSSVINTLRTKNVCKVAPIPGETKVWQYITLTKRIYLIDCPG

SEQ ID NO: 113401 - protein, 172 aa, Gossypium hirsutum
  unsure (1)..(172): unsure at all Xaa locations
  Clone ID: uC-gsflnu33B064h06b1.pep
PLFFGATLFLLCSFANAQPPALTLTIVNNCPFTIYPAIQTNAXGYPVLERGGFALSTLTHRFFPAPTAHWSGRIWARTGCTYDNGLFSCATGDCGHRIECNGLGGASPVTLAQFSFHHGGEKDLSSYEVSLGDGFNVPXTLTPHEGKGVCPVVGCRVNLLRRGPRCEAEVGA

SEQ ID NO: 113402 - protein, 32 aa, Gossypium hirsutum
  Clone ID: uC-gsflnu33B066c03b1.pep
NHPYNDHNSIIKLHFHIILLTEIRIKFDPLVY

SEQ ID NO: 113403 - protein, 39 aa, Gossypium hirsutum
  Clone ID: uC-gsflnu33B066c08b1.pep
SGTFLGCTKGVEGSAPFCKGHGGGKRCAFEGGGVCTKSV

SEQ ID NO: 113404 - protein, 127 aa, Gossypium hirsutum
  Clone ID: uC-gsflnu33B066c12b1.pep
MGEQLKLRGTLSGHGGWVTAIATTPEDPNMILTASRDKCIIVWTLNREEDNYGTARRSLRGHNHFVSDIAISSDGQIALSGSWDTTLRLWEINTGKCTRRLVGHTKDVLSVAFSSDNRQNVFVFRDH

SEQ ID NO: 113405 - protein, 55 aa, Gossypium hirsutum
  Clone ID: uC-gsflnu33B066d05b1.pep
RSVHTVISLPYGDHTYYSAICRDALLVLRPGKRWLLIWSSRRYLAVCESQLHVGL

SEQ ID NO: 113406 - protein, 143 aa, Gossypium hirsutum
  Clone ID: uC-gsflnu33B066f08b1.pep
MFKIYDAMRFSREQDDSCYFIDSIDHITQDSFQEIVQEETMKPYLAQGKEIGEEPNNHSSRQVEYEGIKINDELKQKPSIEEPPKLELKQLPNHLEYIFLGNNSTSPVIITSNLQPKEKEELIQVLKEHKKAKAWKISDIKGI

SEQ ID NO: 113407 - protein, 55 aa, Gossypium hirsutum
  Clone ID: uC-gsflnu33B066g10b1.pep
FSSRSCSEFYYMCGRLVLWCQVPNGSSTSNGFNISISTFMPLFNSLVIGVLFLSG

SEQ ID NO: 113408 - protein, 38 aa, Gossypium hirsutum
  Clone ID: uC-gsflnu33B066h02b1.pep
NLRTYWIFDIRKEVYLEKSITLQSMQTLSFHPTIMIDS

SEQ ID NO: 113409 - protein, 124 aa, Gossypium hirsutum
  Clone ID: uC-gsflnu33B066h09b1.pep
GREMTCGICFENYSYDRLHAAACGHPFCKSCWAGYISTAINDGPGCLMLRCPDPSCAAVVGQDMVNALAFVEDRQKYFRYFIRSYVEDNRKTKWCPAPGCDYAVEFILGSRSFDVTCHCSYSFC

SEQ ID NO: 113410 - protein, 60 aa, Gossypium hirsutum
  Clone ID: uC-gsflnu33B066h10b1.pep
GVGNQQNPEQQLAQEDAKRQADERRQMMLSQILSSEVRERLARIALVKPEKARGVEDVLL

SEQ ID NO: 113411 - protein, 33 aa, Gossypium hirsutum
  Clone ID: uC-gsflnu33B068a04b1.pep
PWRLDKKSFRPLTETGYLAEKCHITPPITQNCT

SEQ ID NO: 113412 - protein, 99 aa, Gossypium hirsutum
  Clone ID: uC-gsflnu33B068b02b1.pep
TRPVKTTENTQERSIMNTLTMLHDYEKNIKQDPQSLERAEALESLLEICASLLKQQRLEELAGVLRPFGEEAVSSRETAIWLTKSLMNAKSKIPVDHRN

SEQ ID NO: 113413 - protein, 73 aa, Gossypium hirsutum
  Clone ID: uC-gsflnu33B068c04b1.pep
MAEAPRGRVTITLGRSGQVVKRSGAASDDSLPVAGTKRSVRDRLGGNIDSSLLNGGQLNNKRQRGDGQRASLN

SEQ ID NO: 113414 - protein, 93 aa, Gossypium hirsutum
  Clone ID: uC-gsflnu33B068c11b1.pep
FATQSTTTTPLCSPSLVIPSHFDWHEYGLGHSCVPHIQCPHSLRHGHVTWPCVPHSHFDWYEHGLGHSVPYIQCLHGLPHMHVTRPCVASITL

SEQ ID NO: 113415 - protein, 76 aa, Gossypium hirsutum
  Clone ID: uC-gsflnu33B068d06b1.pep
FWGPQKKTFALHARGRKLGSFKRGAPFFFFFFFFFFFFFFFFFFFFFFFFFFFFFFFFFFFDTNQEQQPIYIFIRF

SEQ ID NO: 113416 - protein, 55 aa, Gossypium hirsutum
  Clone ID: uC-gsflnu33B068f08b1.pep
DAWADAWALSFIFPLYQVRFSITPATTLSLRMTYSYSSQNPAIEQHRAIISNKLG

SEQ ID NO: 113417 - protein, 49 aa, Gossypium hirsutum
  Clone ID: uC-gsflnu33B068g03b1.pep
ILLNPSFTFPLSVYIYYNCNLFLSFQVLKFLWMMKCFVAFFFCYSAVYG

SEQ ID NO: 113418 - protein, 78 aa, Gossypium hirsutum
  Clone ID: uC-gsflnu33B068g07b1.pep
SRRFLSQKTQFPSPPPLKWFFPMWDYNKPVNVKQNPGVLPSSLALQTMGTLYRLVTKAIPDLTDISRFSKFSFLCILH

SEQ ID NO: 113419 - protein, 60 aa, Gossypium hirsutum
  Clone ID: uC-gsflnu33B068h03b1.pep
PFTFHEIVCPPKLSSSQYKNHRHSPQNSSYFFINFPRFSSVPLKKENPEILLSSFPLIFT

SEQ ID NO: 113420 - protein, 29 aa, Gossypium hirsutum
  Clone ID: uC-gsflnu33B070c09b1.pep
RNEVIWSMVGAQTTEQGDCSKFKGNVPHC

SEQ ID NO: 113421 - protein, 55 aa, Gossypium hirsutum
  Clone ID: uC-gsflnu33B070d05b1.pep
EKSIKAPPTLRTTRKENNGNAFNLIIQKPLGSSILTPPLQHQQKEGSRVLFVQLS

SEQ ID NO: 113422 - protein, 101 aa, Gossypium hirsutum
  Clone ID: uC-gsflnu33B070d06b1.pep
VRPRVRPRVRSLPIHKMRDHVLIYLLLAWLLLIHYQLQGSDISVRAIDSVPAVHFKFSTPRSLMPRARVRNALPTWVEMKKIHKSPSSPNPVKNRRSPSKH

SEQ ID NO: 113423 - protein, 66 aa, Gossypium hirsutum
  Clone ID: uC-gsflnu33B070e03b1.pep
IRVSEVRLFMSSSNVELEYEWLSMVKSNHEDSVGYSSYTHTGHRFKCDHASADQISIHSACGVISS

SEQ ID NO: 113424 - protein, 33 aa, Gossypium hirsutum
  Clone ID: uC-gsflnu33B070g08b1.pep
ASVLSQLKELKAELSLLRVSEGHWWCSQQALQD

SEQ ID NO: 113425 - protein, 39 aa, Gossypium hirsutum
  Clone ID: uC-gsflnu33B070g11b1.pep
HTTCCIHVFRPTFLPLFQASRCCQILLKFETSSISLVCS

SEQ ID NO: 113426 - protein, 79 aa, Gossypium hirsutum
  Clone ID: uC-gsflnu33B072a06b1.pep
MTDHHQRVGQLRSTSEILKKFDEHFTAHPFTLLLLSFLLLSLRCLGESGSLLLNSFIDRDPSFKCLLSRLDLHHSHPHA

SEQ ID NO: 113427 - protein, 154 aa, Gossypium hirsutum
  Clone ID: uC-gsflnu33B072b09b1.pep
IGGILQVGAHGTGAKLPPIDEQIISMKLVTPAKGTIELSKEKDPELFYLARCGLGGLGVVAEVTIQCVERQELVEHTTVSNLKDLKKNHKKMLSENKHVKYLYIPYTDTVVVVTCNPVSKWRGPPKFKPKHTTDEAMQDIRELYKDLKEDRARD

SEQ ID NO: 113428 - protein, 85 aa, Gossypium hirsutum
  Clone ID: uC-gsflnu33B072b10b1.pep
YARLEKIFPHLIPINYPSLSCYNTWPALLSCFSFSCYMMNKEPLPLTNACTDLIRVLTQPGTDPRAENHTHATSTSSPLIERGFQ

SEQ ID NO: 113429 - protein, 148 aa, Gossypium hirsutum
  Clone ID: uC-gsflnu33B072c05b1.pep
SSSSSPPPSSFSKEEEIANETPCNYTYGRWVHDKMGPLYNGTTCGTIKEGQNCITHGRPDLGYLYWRWQPSQCNLPRFDPNTFFNLLSNKHIAFVGDSMARNQLESLLCMLATASYPNLVYKTGEDNKFRRWHFSSYNITVSVYWSPF

SEQ ID NO: 113430 - protein, 94 aa, Gossypium hirsutum
  Clone ID: uC-gsflnu33B072d03b1.pep
FSSATLEEKLRPHKECHRVELESLCQSCEEIFRKFREDTKKNFSDALFEWRSNLILHAQVATSPLDLSHVNFNCLRDISSVSLNFKVYHPDGEE

SEQ ID NO: 113431 - protein, 87 aa, Gossypium hirsutum
  Clone ID: uC-gsflnu33B072e07b1.pep
ENDKLLALMISTPRSEGSSEMSESSKPQGVQLSITEFYRTTKTPSQEKLGEDLVKQSSSPGVGSSKQKRKVSGSKLSKAVRRRLLFG

SEQ ID NO: 113432 - protein, 63 aa, Gossypium hirsutum
  Clone ID: uC-gsflnu33B072e09b1.pep
GITSLITPKYKIRAFVLGDLISLPWPSVLLLFVLQTPYWNNLGVSFLNCALEHPVFTRCGPPR

SEQ ID NO: 113433 - protein, 114 aa, Gossypium hirsutum
  unsure (1)..(114): unsure at all Xaa locations
  Clone ID: uC-gsflnu33B072e12b1.pep
LTHAVNHGTIPATMVGVRAHGVTCRAXFIARHMTNQETRCDTVGQHALTDPMNDGLHDGHADVFDLTCDMTRGGISEVYSGVNISADIYSRLKYRFRPRHISNHEYMEGEKGRD

SEQ ID NO: 113434 - protein, 86 aa, Gossypium hirsutum
  unsure (1)..(86): unsure at all Xaa locations
  Clone ID: uC-gsflnu33B072f02b1.pep
DGRTGKTTFMKRHVTGEXKRNTQPTIDEEVDSLDXFTNCGRNGQYSWDTGGQEKKARTRDGYNIHGQCAQKWFDGTAPNDIQACSN

SEQ ID NO: 113435 - protein, 134 aa, Gossypium hirsutum
  Clone ID: uC-gsflnu33B072f08b1.pep
MAKMRGCIVTVALLLLLLLCLHQTPVECKERLIRQLSSQPSSATKPQEFKIGFKRVILSIVLGILTGLIGAILFALLIKIAVQYINQTPFLKGPVIFSPKISSKTLQSALANENQLLGSSSNGKYYKTGLDNGL

SEQ ID NO: 113436 - protein, 67 aa, Gossypium hirsutum
  Clone ID: uC-gsflnu33B072f10b1.pep
YASVPLGLQINAIARMKNKQSHYRRSMGDTRAIEVWILSTPSFIGHLQQDDDANMGMLLCLWTQLVY

SEQ ID NO: 113437 - protein, 107 aa, Gossypium hirsutum
  Clone ID: uC-gsflnu33B072h01b1.pep
IPYDGTGVYRPPKFAPAVVEEDQKMSREERNALRREKETLRKASRSGYIREMMDDLEGKPEEVREIIGTESRELTRYMEKMERRAQQEEELFTRAPVTKKDKKIEKH

SEQ ID NO: 113438 - protein, 68 aa, Gossypium hirsutum
  Clone ID: uC-gsflnu33B072h06b1.pep
LVTVFCANRWGPCRIYKPAWGQQSLSLIADIMTIVNYRNKNEEDGTKSTYRVYCTFYRQKTKLSCLTM

SEQ ID NO: 113439 - protein, 54 aa, Gossypium hirsutum
  Clone ID: uC-gsflnu33B073a03b1.pep
KISMQVLQKDTSPTVTNLISLDTLHFATAGKSESKFQNCSSPISRPPPKVISCF

SEQ ID NO: 113440 - protein, 44 aa, Gossypium hirsutum
  Clone ID: uC-gsflnu33B073a05b1.pep
FLSLTLSLLYGRLYFDQKKFFMAVFPGVHFLNLFLKIINFGRIY

SEQ ID NO: 113441 - protein, 109 aa, Gossypium hirsutum
  unsure (1)..(109): unsure at all Xaa locations
  Clone ID: uC-gsflnu33B073b03b1.pep
FVLQIAYVEGAGXGAIAMEDIEVGDIAMETPASITISEDXALNLTRFKYYRRLLDLTXSETMSLLSCMKEWHNCNTQFTMCFDTLPVYFNTGLSFGVVAIIASDGNFAF

SEQ ID NO: 113442 - protein, 136 aa, Gossypium hirsutum
  unsure (1)..(136): unsure at all Xaa locations
  Clone ID: uC-gsflnu33B073b08b1.pep
SLADLLVQYLKKFVAPDVSILSSDSAINDFVEAAGTFFPIYIGFGLNETVIYNLAVKYKKKAWFSVAKDFSDDAMVLYDFDKVPXLVALHPSYKQQSVFYGPFEEFFLWDFGKQNLLSLGVPLNHETLKLLKDEER

SEQ ID NO: 113443 - protein, 90 aa, Gossypium hirsutum
  unsure (1)..(90): unsure at all Xaa locations
  Clone ID: uC-gsflnu33B073c11b1.pep
RVRLVGAFEETTTGVKRLYXMQANGTLMFPCINATDSVTNSKFDNLYXGCRHSLPDGXLMRATDVKNAVKVXMFCGYGDVGKGMCLLPLK

SEQ ID NO: 113444 - protein, 64 aa, Gossypium hirsutum
  unsure (1)..(64): unsure at all Xaa locations
  Clone ID: uC-gsflnu33B073d02b1.pep
SLWMTPCAESFSARXLLGQKMPRLNDEVIDERGPPXDSRPENCPVRXALIYRSIAWPRFDMLPF

SEQ ID NO: 113445 - protein, 53 aa, Gossypium hirsutum
  Clone ID: uC-gsflnu33B073d06b1.pep
LLQNNAFAFFIPNKNDHQNHLMQQPLMSVIVLPSTGFFFILFRLLKSSPSEAR

SEQ ID NO: 113446 - protein, 123 aa, Gossypium hirsutum
  unsure (1)..(123): unsure at all Xaa locations
  Clone ID: uC-gsflnu33B073d10b1.pep
FSDARGLPTPEALSIVIRNAVRFLNSHAIGALTXIAKRLEQDRDSSDPTVRGQIQTESAQAGLTMQYLRSLLLELGRTIMTLRMGKSPAEFSFNAGPAVYISPSGSKSYKWVKPFSHFKPEFL

SEQ ID NO: 113447 - protein, 55 aa, Gossypium hirsutum
  Clone ID: uC-gsflnu33B073e03b1.pep
FIMPISNLQLPRQICLSETFRLAGPMRHLTPMLLRLLWLNLIVTLIFAFAGSGSG

SEQ ID NO: 113448 - protein, 81 aa, Gossypium hirsutum
  Clone ID: uC-gsflnu33B073e11b1.pep
FLGKGLVLVRNSPSLAPRTKILIRSLNSGVLPRIHLLKIHVEPYQLIIYSQWSTFATCLYFTTWNNDCRQMFSWDKQNKQH

SEQ ID NO: 113449 - protein, 113 aa, Gossypium hirsutum
  unsure (1)..(113): unsure at all Xaa locations
  Clone ID: uC-gsflnu33B073f03b1.pep
VRPRVRYSHRIDPIKCLRKSFFFVYPQKGETWAFFKDWDIKWVSEPEKHKPPYRYYFVEVLTDSDEELVIGVAHXGKVNGYVSIFQQXLTVDGVISFQVYSRELYRFSHQVPL

SEQ ID NO: 113450 - protein, 50 aa, Gossypium hirsutum
  Clone ID: uC-gsflnu33B073f06b1.pep
FDSRNRLPTTFRYGSNIHTLNHDEEDSRFSDRKSFWNGNSTQYGGNCYNT

SEQ ID NO: 113451 - protein, 86 aa, Gossypium hirsutum
  Clone ID: uC-gsflnu33B073h01b1.pep
SGIQSSNLLCHLTLVMKSSALFFNSSLAKTSQFFHSLWNPSYHLFITFIFFWFSTPEWTNSQVFDDSDQRIHRSTCSYHERLRQKT

SEQ ID NO: 113452 - protein, 59 aa, Gossypium hirsutum
  Clone ID: uC-gsflnu33B074b04b1.pep
CTVQSNSSINVHSRPVDFGKAFEMPLSAPIYINRLSAHLCLPIALGVQMQDDPCKYGTS

SEQ ID NO: 113453 - protein, 60 aa, Gossypium hirsutum
  Clone ID: uC-gsflnu33B074d07b1.pep
QVNPLPHRFVLLHFTNHFREGKRSWSELGLITKLALKLYYFATQVSQAFFLYLIKIIFKL

SEQ ID NO: 113454 - protein, 81 aa, Gossypium hirsutum
  unsure (1)..(81): unsure at all Xaa locations
  Clone ID: uC-gsflnu33B074e03b1.pep
MYVGTANQDLDNRDRGLIVGRETPQGQKALVVLTDVYAHRGSVDRIICFNLWPAELXNLMAMPXLAQRILCVNGMYQLCEA

SEQ ID NO: 113455 - protein, 148 aa, Gossypium hirsutum
  Clone ID: uC-gsflnu33B074e07b1.pep
LRYQAVNIVAARLGRAEPPLRREVIEYMSDANAHLWSMRRSKANFLRLTSVFSGLFEVGKWFGEVCKWKNPMTTVLVHFLFVMLVCFPELILSTVFLYMFLIGVWKYRYRPRYPPHMDTSLFCADAVSPDELDEEFESFSALRSLDLV

SEQ ID NO: 113456 - protein, 90 aa, Gossypium hirsutum
  Clone ID: uC-gsflnu33B074f12b1.pep
PRTSPVSTQLCDNPKSSQGAGLGSTRVSPPMYYQCPPLLALLQAPLPNNALLIMRVLVRQPTTGGCVAIRVVVQSTAMNLLVVQVPLPAV

SEQ ID NO: 113457 - protein, 121 aa, Gossypium hirsutum
  Clone ID: uC-gsflnu33B074g03b1.pep
PGGIEIAVKRILYENDGMKEFLAEISSLGRLKHRSLVGLKGWCKKEKGSFMLIYDYMENGSLDKRVYYDCDETNILTCEERIRILKDVASALLYLHEGWEAKVLHRDIKASNVLLDKDMNG

SEQ ID NO: 113458 - protein, 35 aa, Gossypium hirsutum
  Clone ID: uC-gsflnu33B074g06b1.pep
VFFLIYLCSISLRKYIIGCYSCLNPIISSEKRQQH

SEQ ID NO: 113459 - protein, 141 aa, Gossypium hirsutum
  unsure (1)..(141): unsure at all Xaa locations
  Clone ID: uC-gsflnu33B074g12b1.pep
RPDIRNQRLGMFEHKQYQELYKNNIRGNHTYWAGRLGEPKLMXLYCNNISGTMRTXIEKLGRLVITRLNDNPXRGPIYRELGGIPCLKVVEXETVIXCGTFPTSGPFERITEHTLEENFNLEGWEVYGLGSCYTCWCRRNR

SEQ ID NO: 113460 - protein, 72 aa, Gossypium hirsutum
  Clone ID: uC-gsflnu33B074h02b1.pep
LKFHVFLKLERIFGYLESTRESKSRKLGHNSSVFQDAKHCLIFKIFFWFKFGSKNFSEVFKRYVQKQITMNN

SEQ ID NO: 113461 - protein, 78 aa, Gossypium hirsutum
  Clone ID: uC-gsflnu33B074h06b1.pep
SLINMGSLIKATVWSTCFAALIIAIAAQMDMPPGMVMPPGSVMPSAPTPNRSGHVVSPSVVLGLLAFMFSIFVFNQRA

SEQ ID NO: 113462 - protein, 160 aa, Gossypium hirsutum
  Clone ID: uC-gsflnu33B074h07b1.pep
RPVLHFPSPQSTNTSSSKPVLSYAPQTSLTCAHGERNDTVNSITSGDPEGEGEEEEEELSLMALVVTLFRKSLAACKSMERRELCAMEIGWPTNVRHVAHVTFDRFNGFLGLPVEFEPEVPRRAPSASTTVFGVFTESMQLSYDFRGNICSTILLLLQDV

SEQ ID NO: 113463 - protein, 142 aa, Gossypium hirsutum
  Clone ID: uC-gsflnu33B074h08b1.pep
EREEKMEKQSKSYGVVLPTMDEDHEEFVFIDEDYDVDDDLSHWEFIDSSVTDSDDADDDVSFHRGELLRRNVESFIPLTFPFPPITEVKKSIPIPAPIQDTDDRDPSLDGSDDQDDDVDASFHRDELSRRRNLTFGMPFPFP

SEQ ID NO: 113464 - protein, 153 aa, Gossypium hirsutum
  Clone ID: uC-gsflnu33B074h12b1.pep
LQRICDGIWFNMIEELITVFEAAASDRNGNITFHKLVGRLDNSAVSAVGARLAFKSNEEIAVQVRSILLDEVIPESEPVLLLKIDVQGWEYHVLKGAKKLLSRKKGEAPYLIYEEDERLLQASNTTAKEIRDFLSGLGYTHCTQHGTDAYCTK

SEQ ID NO: 113465 - protein, 59 aa, Gossypium hirsutum
  Clone ID: uC-gsflnu33B075b09b1.pep
SYTRPHTCTALEGLWAVLSTQDYGHQNATTWPLYRGIYIQLTRRSPTKLWRLKHCSYPA

SEQ ID NO: 113466 - protein, 49 aa, Gossypium hirsutum
  Clone ID: uC-gsflnu33B075c04b1.pep
KGMATIHKVLPTIEIIFSVFNVTSYYNGGVKSLSPNAWERKFWNSLQCS

SEQ ID NO: 113467 - protein, 71 aa, Gossypium hirsutum
  Clone ID: uC-gsflnu33B075c09b1.pep
SLAEKMKIFNWVQRRFHHNVLKDGLARNVKKTDSIAIDSNTKALLEQVALVDMLDGWRDGALTIGTFGFRS

SEQ ID NO: 113468 - protein, 56 aa, Gossypium hirsutum
  Clone ID: uC-gsflnu33B075d10b1.pep
TNQKKVRTVWNRKKMKHLDRKEGRNKIHGNGVKTFFQLKYLHNVGFLVYQEFRYCY

SEQ ID NO: 113469 - protein, 81 aa, Gossypium hirsutum
  Clone ID: uC-gsflnu33B075d12b1.pep
LTRGETTNTLVHFFTNPAEGTIIRAPNELIDDQHSQLFKDIDFMDFLSFFFTEQVKFIVSPDQIYSFASLLLPISDQKHGS

SEQ ID NO: 113470 - protein, 114 aa, Gossypium hirsutum
  unsure (1)..(114): unsure at all Xaa locations
  Clone ID: uC-gsflnu33B075e11b1.pep
RQCXVSLKSGTLNSLSDEQKVELIQFHIIPTYLSSAQFQTISNPLRTQAGDSGDGKFPLNVTSSGDTVNITSGLTNTRVSGSDYSDGELXTSRQIDVVXPLQIFDPRPSAPVAC

SEQ ID NO: 113471 - protein, 165 aa, Gossypium hirsutum
  Clone ID: uC-gsflnu33B075f08b1.pep
FLAKALLVKEKMIEDQEKQKSQSEAEFSALMDRLDLTEKENAFLKYKFHVLEKELEIRNKEMEYTRRSEDLAHKQHLQDVKNIAKLEAECQKLRLLLQKRLPGLAAVMKMKNEVEMLGKDKSETRRRKLNPTRDLIVRGSTADISPENPIKSINLLLEQLHNVEE

SEQ ID NO: 113472 - protein, 121 aa, Gossypium hirsutum
  Clone ID: uC-gsflnu33B075g04b1.pep
IVLGRDIADAHYKARLYAGISVSGMNGEVMPGQWELQVGPTDGIYDGDELWLARYILERITEIAGGALSYDPKRIQGDCYGARAHTNYRTKFMRCDGRYEDIKKAVVKLGARHTQHIVAYG

SEQ ID NO: 113473 - protein, 63 aa, Gossypium hirsutum
  Clone ID: uC-gsflnu33B075g09b1.pep
GRVGYTAYAKLIDENRWYHFDDSHVSPVNESDIKTSAAYLLFYKRVNESKMEIGESSYSHSTS

SEQ ID NO: 113474 - protein, 144 aa, Gossypium hirsutum
  Clone ID: uC-gsflnu33B075h08b1.pep
MSIFMASTSALAGNAQNQSGFSLIGSSELEGITQGRPMKPRSTEALLQSPIDMDIKQREARHDVFIKYGKEGYCFMGTDTNFMGGFGQYPIAEMARLDAEHFTPRFPGNGASLTLGLPHCENLYLPATYQTLFQTKPCRWGEGS

SEQ ID NO: 113475 - protein, 56 aa, Gossypium hirsutum
  Clone ID: uC-gsflnu33B075h09b1.pep
NKANLSTHICWLFTYLFFICFLTSSHATGKPISTLTTTIHIFLCLLSSSFFVLLIF

SEQ ID NO: 113476 - protein, 46 aa, Gossypium hirsutum
  Clone ID: uC-gsflnu33B075h10b1.pep
RMVVSVYMATTFLLLLIKFIFISRQAYLIHVRRISYCYQLLHLLLH

SEQ ID NO: 113477 - protein, 78 aa, Gossypium hirsutum
  Clone ID: uC-gsflnu33B076a05b1.pep
LVPAVAIGLGIHPRWFQLQDSVFSNPSTFFFGIAISVLIMVHLVYQSHFKHLSDQSLNTDTVACVTLNFHGTTHSSIS

SEQ ID NO: 113478 - protein, 77 aa, Gossypium hirsutum
  Clone ID: uC-gsflnu33B076b04b1.pep
ITSHNRIILHPSGWVLHVLFEHSFSPSCAIQPVLGAGEENGVFLVIVTSSHGIAKRAVHLCSRKRTPGRTRLRTRGS

SEQ ID NO: 113479 - protein, 51 aa, Gossypium hirsutum
  Clone ID: uC-gsflnu33B076c04b1.pep
SPTARCLVGLVFLAVPFVPVVNPLIIPLSSALVVPYPFPEDPSCLSSRERS

SEQ ID NO: 113480 - protein, 40 aa, Gossypium hirsutum
  Clone ID: uC-gsflnu33B076c08b1.pep
SIHEVSILTEQWAPDNHSGVPGLGGFLINAPCPWTQLIFQ

SEQ ID NO: 113481 - protein, 33 aa, Gossypium hirsutum
  Clone ID: uC-gsflnu33B076d08b1.pep
LPLLDPTSFFSVVKLNQIVNRLKPPLSPPTRPR

SEQ ID NO: 113482 - protein, 75 aa, Gossypium hirsutum
  Clone ID: uC-gsflnu33B076e01b1.pep
AVSSASPEWYIASSHPVQLVIINSTCFCPLSCSASRVSLDLAKFTLGSAFGPPYRLTASSSFRSHPRVSGAYASP

SEQ ID NO: 113483 - protein, 42 aa, Gossypium hirsutum
  Clone ID: uC-gsflnu33B076e04b1.pep
SFRRNMKKLYGIIKVGHFYGNDKVLHSLNISGSAAWITLDIR

SEQ ID NO: 113484 - protein, 80 aa, Gossypium hirsutum
  unsure (1)..(80): unsure at all Xaa locations
  Clone ID: uC-gsflnu33B076f02b1.pep
HAFGQQGGLMASLMPKEEYSPKAXYTFDIGQNDLGEGFFSNLTVQEVNATIPDITNTVSANIKNIYNLGARFLWVHNNWT

SEQ ID NO: 113485 - protein, 57 aa, Gossypium hirsutum
  Clone ID: uC-gsflnu33B076g07b1.pep
RTRGRTRGFWLLVYLHCCRFIGITRGNPWFGWMPHGVRKRKRLHEGNPRGSDIQKVQ

SEQ ID NO: 113486 - protein, 60 aa, Gossypium hirsutum
  Clone ID: uC-gsflnu33B076g11b1.pep
LLVMISHLVSSTSSHVFRLSGNISRLYPTVYPPRPKTPVSLLRADPLKVYCLDYMPQIPG

SEQ ID NO: 113487 - protein, 65 aa, Gossypium hirsutum
  Clone ID: uC-gsflnu33B076h05b1.pep
HSTTLSVASDISASTILGLRNIKCPTVLHQSSLFRRAAKAHLSVWDQDLSDCSYSPQPRIVATPC

SEQ ID NO: 113488 - protein, 73 aa, Gossypium hirsutum
  Clone ID: uC-gsflnu33B077c03b1.pep
AYTALFHRCNVRLPQQVEKASMTLSTANRPQHHEAHLVTLSDRHFKQAQSWNAAVPERGKEGGSKLSQASTLT

SEQ ID NO: 113489 - protein, 32 aa, Gossypium hirsutum
  Clone ID: uC-gsflnu33B077e11b1.pep
NLSSHVATKDSDPLGWRGPRTRMETLIIHIRF

SEQ ID NO: 113490 - protein, 102 aa, Gossypium hirsutum
  Clone ID: uC-gsflnu33B078a01b1.pep
TAKKTIMSIPTKGHAQSFHTHSQDLTWNIHTALVTAHSALKSQRKAGIGTGLSMRIIIKGPLLLLLQPAVMLEWLLLHHCVPLHPMHLNEEETWLLWHHSQK

SEQ ID NO: 113491 - protein, 68 aa, Gossypium hirsutum
  Clone ID: uC-gsflnu33B078a09b1.pep
SFAWDHISMISIMNTVEGFLGQHGIALVALCHVAMTQVTQFHIPFTDIYYDSYMRVKFLHDALKIGLL

SEQ ID NO: 113492 - protein, 84 aa, Gossypium hirsutum
  Clone ID: uC-gsflnu33B078c10b1.pep
PSTLALIAVLRLTRAFSSVIPVIREQLMVHLGTVCPRVHHDKSALLPSVSASFGQVAGCTVCQWLVLVPVGMCGHRRCVAMACT

SEQ ID NO: 113493 - protein, 184 aa, Gossypium hirsutum
  Clone ID: uC-gsflnu33B078d04b1.pep
VVYEADIDPVKMILPDEEGEPEKLTTVGDGAASQQVEQHYIRSIESTVVIRQLPSEGLSFQLWPAATTLVTLLDNYLRHPSKSPLTATLSTDRKLKILELGSGTGLVGIAAAVTLGANVTVTDLPHVIPNLKFNADANADVVTKRGGTVDVAPLRWGEDDDLEVIGREFDLVLGSDVVYHDHLF

SEQ ID NO: 113494 - protein, 56 aa, Gossypium hirsutum
  Clone ID: uC-gsflnu33B078e02b1.pep
SFSTIVAIIRNPSLIHVIRLTKHPECSVFPSRFCSTWTTQENPRHNNQPNLAYQCA

SEQ ID NO: 113495 - protein, 147 aa, Gossypium hirsutum
  unsure (1)..(147): unsure at all Xaa locations
  Clone ID: uC-gsflnu33B078e08b1.pep
MVGVFEVGAVPFNPDGWGPPDSAAAASITTTLPLHVPFAPFSRSDKLGRIADFTRSFPSSNANPSNRPSSRHGAGNPADSPFDFSLDVDAFPLANPEDDSSFRLVDAKPPPRPKFGPKWRFNQNRPQLPQRRDEEVEARXREAEKNV

SEQ ID NO: 113496 - protein, 83 aa, Gossypium hirsutum
  Clone ID: uC-gsflnu33B078e09b1.pep
RFDHALTLPLFIWGQTIVISKMRIMTKEGLKWTDRRVSFMNEILAAMDTVKFYAWEKSFQTRVHSIRNDELSWLRRAQLLSAV

SEQ ID NO: 113497 - protein, 91 aa, Gossypium hirsutum
  Clone ID: uC-gsflnu33B078e10b1.pep
IHSSYNALRFVSGVTTTFTPKAGLKIIQLYMEGYRQDWKLSFEEDTVKRGGWQQGGILVAGPGKTNILYIHKDKEAGDDPDIEDILKACCS

SEQ ID NO: 113498 - protein, 50 aa, Gossypium hirsutum
  Clone ID: uC-gsflnu33B078f01b1.pep
IKIYDLFPGIGKFILAHIGNVIWSLCCALCDLSDIFSIPDNQRLIFCYRA

SEQ ID NO: 113499 - protein, 102 aa, Gossypium hirsutum
  Clone ID: uC-gsflnu33B078f06b1.pep
MEVRPNQAVDNSSTSPQQHRRRAAAAASKQPVSATNAVDTTSVTQRLQKELMALMMSSGDLGVSAFPEGESIFTWIGTIKGGEGTMYEGLSYKLSLRFPLDY

SEQ ID NO: 113500 - protein, 127 aa, Gossypium hirsutum
  Clone ID: uC-gsflnu33B078g05b1.pep
RGDTGGGPFANQGGKMLGKANGGGLFGNKPTGKKGMLCKANKLGNPRGFPGPKLEKAGQGNEFRGPKKKNKTSEERGRKAGSPKRAAPKNGKASMEALESFDLFERIFNNFLKNFFFFFFFFFPKHQ

SEQ ID NO: 113501 - protein, 163 aa, Gossypium hirsutum
  unsure (1)..(163): unsure at all Xaa locations
  Clone ID: uC-gsflnu33B078h07b1.pep
MSVLGYRIGKSKIKHGMKYIQIPGLPHDAVRVFIRFLYTSCYEGAELEKYALHLXELSHXCSVTLLKRVCICYLEQDFLTTENVIDTLLLARKCDAPRLVLICVRLVVKNFKSVSSTEGWKLMKRIYPDIEQELVESVVEADSXKXERQRKIEEKXVYTQLYE

SEQ ID NO: 113502 - protein, 146 aa, Gossypium hirsutum
  Clone ID: uC-gsflnu33B078h11b1.pep
LFRVRPRVRPRVRPRVRPNNYSMSEARSYLVLSRCSNDLTGGSHGGSSDGWSMRTFSELEASSQRERWSFDSEHLGSGYGKISGCSSRFSYSPSIDARTCGACSKLLAERSSWSSNEISVVSVLVCGHVYHAECLELMTPEADGFD

SEQ ID NO: 113503 - protein, 99 aa, Gossypium hirsutum
  Clone ID: uC-gsflnu33B079a02b1.pep
PSQFSSSSSSYVYRASSLFPIRFLHASTSAIEGPVFASCSLLWLSIPSVSLPFFFSSLSPSYVSIMSDSPFLAFISNPHDLSSRQFPPLRASPSLRPVL

SEQ ID NO: 113504 - protein, 73 aa, Gossypium hirsutum
  Clone ID: uC-gsflnu33B079a07b1.pep
RSRALRTHGKCYRVTMRRHHHQPLDLYAPHTGLCPTFPYRTALHVRVSRSGKSPIRYIGQLTKGECAANRFSS

SEQ ID NO: 113505 - protein, 111 aa, Gossypium hirsutum
  Clone ID: uC-gsflnu33B079b03b1.pep
SRCALASLSMSQNNSGRSGRCNPVVPVSIVVRARHVACEVILVLWYAATVFGSNAHSRWWDAIPIGAPVWRLLPHAGVVRLRILTSRLTSPVRAISHRGQSCRVCAHCPDA

SEQ ID NO: 113506 - protein, 102 aa, Gossypium hirsutum
  unsure (1)..(102): unsure at all Xaa locations
  Clone ID: uC-gsflnu33B079b10b1.pep
AAGPKPAVEKKTTDAPKAPEEKKPKAGKKPPEQGGATVDTKKKKATKSVETHKIYMTRVLKQAHPDTSISSNAKGIMNMVSNDIDEKLAHEAXRTARHNRKP

SEQ ID NO: 113507 - protein, 42 aa, Gossypium hirsutum
  Clone ID: uC-gsflnu33B079d12b1.pep
TSGYGTHTDMEVIIMMTYILDLEVLGLTNIHMRAQRGVSRHN

SEQ ID NO: 113508 - protein, 65 aa, Gossypium hirsutum
  Clone ID: uC-gsflnu33B079f03b1.pep
VERTSGKFMRRYRLPENAMMDQIKDCMENGVHTDTVSKRDGKQPGDKAIGSHGYTNERWILSSVF

SEQ ID NO: 113509 - protein, 89 aa, Gossypium hirsutum
  Clone ID: uC-gsflnu33B079g07b1.pep
ISRLFHQLDVLANAELTIQQTAHLVTMFSAFVREAECTLHTGSQQDYHQGCSAFPLLTAVCGLIPVLFPVLPCMPARRRRQFGPTFFAC

SEQ ID NO: 113510 - protein, 82 aa, Gossypium hirsutum
  unsure (1)..(82): unsure at all Xaa locations
  Clone ID: uC-gsflnu33B079h01b1.pep
HAADHAFGDGGDIEPQQGQNLVQTLTGKTITLEVECSDAIDSVRTKIQDTEGIPADQQDLIXTGKQLEDGQTLXADNNMQEE

SEQ ID NO: 113511 - protein, 150 aa, Gossypium hirsutum
  unsure (1)..(150): unsure at all Xaa locations
  Clone ID: uC-gsflnu33B080a01b1.pep
QAPPPHTRDVPPPRIHITPPPPTEGPRNNTTAPNPKDTHDMTTGAQPAGRTAKEPPADSTPRTAENPRALRTGEKGAGRSGKPPHYKSPTXQRGTPNTTSQGGDPTAGNGTGGETTPRTKAAARNSNKKHTGPRTXPKGNAGPGTTEPQP

SEQ ID NO: 113512 - protein, 61 aa, Gossypium hirsutum
  Clone ID: uC-gsflnu33B080a03b1.pep
PFYFFHKHSNAQGSYSMVFLMSRISVTQFPQRDTHKHLLNPAYYHSIWDAAYQYAFSLTPL

SEQ ID NO: 113513 - protein, 70 aa, Gossypium hirsutum
  Clone ID: uC-gsflnu33B080a06b1.pep
RGLWLLRPVTRGVLFWLGFWGLGCPCVLRSVCGRVGPGCGSVGGALFLGSGVSWVFAFWAAPFSRWLGAG

SEQ ID NO: 113514 - protein, 76 aa, Gossypium hirsutum
  Clone ID: uC-gsflnu33B080b08b1.pep
FFPPTNLARGKLSKDTPIQHTNEARANSMMISMSMTCRKERPCLAKAPETQRHAWRHRKDDYEFRDQTRWIAVPVV

SEQ ID NO: 113515 - protein, 164 aa, Gossypium hirsutum
  unsure (1)..(164): unsure at all Xaa locations
  Clone ID: uC-gsflnu33B080c07b1.pep
RHPPGTPGTTHPFVTPPETDKNRGGVETRAPHPPDERPRRTPESEHEPARRETTRPATETDSGGHPGKRRDQNPGAEDQAGPDDDPDGKVASATSAKTNMVTGPGGKTTKTKEANEGTERAQAAXTGGDTEEAGHDADNRKARAKKEQQSPATAQGAHGHQTKR

SEQ ID NO: 113516 - protein, 111 aa, Gossypium hirsutum
  unsure (1)..(111): unsure at all Xaa locations
  Clone ID: uC-gsflnu33B080c09b1.pep
YDRAITVFSPDGHLFQGEYALEAVRKGNAAAGVRGTDIVALGVEKKSAVKLQDSRSVRKIVTLDEHIALARAGLKADARVLXNRARTECQSHRLTVEDPELSKYXTRYIAG

SEQ ID NO: 113517 - protein, 111 aa, Gossypium hirsutum
  Clone ID: uC-gsflnu33B080c10b1.pep
RPAITGWTHPPFIIFSTVTLRGTKSYAKRNQSRQKPNALRCFRNHSLLGRRSILEVDHRPRLPGPTLMSICTGSTFNPTLFEQDPHLYGPTANQWVVRGQHKWVLVGLGSI

SEQ ID NO: 113518 - protein, 45 aa, Gossypium hirsutum
  Clone ID: uC-gsflnu33B080d01b1.pep
APPARRILTSTSSPSQIPHLEEWLALKSCSQCTLSAERGKDSYRP

SEQ ID NO: 113519 - protein, 109 aa, Gossypium hirsutum
  Clone ID: uC-gsflnu33B080e04b1.pep
ESADCPFKGLSETLFPGVCTFESLPDTESFITKFGSSFNPDDSTKEFSFLFLFLRERLDCSAPKSTSSVPKQAALSRDSPFLVSISRSIICLISFFLSSFSGRVGKKVV

SEQ ID NO: 113520 - protein, 158 aa, Gossypium hirsutum
  unsure (1)..(158): unsure at all Xaa locations
  Clone ID: uC-gsflnu33B080e12b1.pep
MALPMKKLIHPNGVLFTGAVTRPPNLSIVTEYLHRGSLYRIIHRPNNHLDERRRSRMALDTARGMNYLHNCTPMIVHRDLKPPNLLVDRNWVVKVCDSGSSRMKHSTYLSSMSTAGTAEWTAPEVLRNEPSDEKCDVYSLXVILWELSTLQHPWKGND

SEQ ID NO: 113521 - protein, 30 aa, Gossypium hirsutum
  Clone ID: uC-gsflnu33B080f04b1.pep
GHCYCKEVKFMHLELEFIKLYVTKCYGSII

SEQ ID NO: 113522 - protein, 105 aa, Gossypium hirsutum
  Clone ID: uC-gsflnu33B080h05b1.pep
NSIVTPVKVEVDLVYLSTPSFFSKHDLNVTIVIADTILVYLSSPPLFSEQGLIVTIVIVPNVGVGFHGGPSFLIEPDFNILLRDRVGSSKPIKKFDFDVGYGKKT

SEQ ID NO: 113523 - protein, 77 aa, Gossypium hirsutum
  Clone ID: uC-gsflnu33B080h09b1.pep
IIMELQPWLLPTTFNILAVRISETMLESQVLKNPKLILVSVCFSSFYFCLVLCSGLMVLLVMLIILDFSSREMVQGQ

SEQ ID NO: 113524 - protein, 79 aa, Gossypium hirsutum
  Clone ID: uC-gsflnu33B080h10b1.pep
CEAPVLVVLVTSQCPSASMAVLWISVVSVFQVGPLGGYPVVTTPPLACPSPPQTSATLWASQRIPLKIPPLPRLSRKIG

SEQ ID NO: 113525 - protein, 60 aa, Gossypium hirsutum
  Clone ID: uC-gsflnu33B081b06b1.pep
LVLPPPLFLIPLYLFCRCTILRCTIQPENRGGKKCRTLYFYCKMNFEYHLTTRNRKLLYL

SEQ ID NO: 113526 - protein, 71 aa, Gossypium hirsutum
  Clone ID: uC-gsflnu33B081c06b1.pep
IPFALKEHNNISLISIVYVNLKHSCSSTSEKDKVLCNHPIPSHPPPPPPISDSLHQSNLSLYIYHLLIVKY

SEQ ID NO: 113527 - protein, 77 aa, Gossypium hirsutum
  unsure (1)..(77): unsure at all Xaa locations
  Clone ID: uC-gsflnu33B081e04b1.pep
IFIFLNISFFFNILIIFFFFFFFIFFLIFLFXNPKLTFHSRNPRVQKTETHQRVSTKPKIPIQQTPHNIRTPLHKSN

SEQ ID NO: 113528 - protein, 144 aa, Gossypium hirsutum
  Clone ID: uC-gsflnu33B081e05b1.pep
MSDLEVSSCGYDKVLVDAECTHDGSVKHIQKFENWGWTTLQRRVLDAVRTDSLTLLQLKLLRNGFRLLKVGGLLVYSTCSLTVAQNEDIVEQFLKENASAELQEINEAEEWPRKSGRIPKTLRFDPLTSQTSGLFVAKFTKLAT

SEQ ID NO: 113529 - protein, 156 aa, Gossypium hirsutum
  unsure (1)..(156): unsure at all Xaa locations
  Clone ID: uC-gsflnu33B081f10b1.pep
RFRLLTSEVISRTAFGSNYLEGKKIFDMLTKLAILVSRNYFKTPIPGISKIWKTADEIESEKLANGIHDCVMEMAKRREKKVETGESDGFGNDFLGLLINAYRDFDEKNRFSIEDLVDECXTFYFAGHETTNSLLAWTILCLAIHTKWQEKHARGV

SEQ ID NO: 113530 - protein, 44 aa, Gossypium hirsutum
  Clone ID: uC-gsflnu33B081g02b1.pep
ESWILCLLVSPKENRIYRRKTTLLSLKAYRCLRGEKQGGGLKLR

SEQ ID NO: 113531 - protein, 75 aa, Gossypium hirsutum
  Clone ID: uC-gsflnu33B081g04b1.pep
NQRPPERPIITHGVHNPKTSMTSRKVIQVKGVSTNFSYIQVPSGPTIVSTGCSLIVEDLSLITQVPKARSAGFFI

SEQ ID NO: 113532 - protein, 129 aa, Gossypium hirsutum
  unsure (1)..(129): unsure at all Xaa locations
  Clone ID: uC-gsflnu33B081g05b1.pep
MHADSAEDSVHQQTREHEAELEAKHMEMEALVYELKGENNTKLSTDRENLLGFVTSLGDWISEFSGEDAKLMGILGRMXQSFDNCISDMKGNDELYDTLKENKKSLISSPAARKPDSLVEERSPFRELN

SEQ ID NO: 113533 - protein, 64 aa, Gossypium hirsutum
  Clone ID: uC-gsflnu33B081g09b1.pep
ALNTLKIGRNDHFSPRLLQNDHFTPRSENRFLSNFFIYYVTPQKCKVCNFSCFDTNFMFALSVK

SEQ ID NO: 113534 - protein, 88 aa, Gossypium hirsutum
  Clone ID: uC-gsflnu33B081h04b1.pep
SPPPSITYPFQFVEYLKCKNKYQHPNGNILTWICWYLNQSDVFSQYSKGILFSPCKSLLDMMKNVSLEFLFFLKSKCIFDCLYNDGNY

SEQ ID NO: 113535 - protein, 95 aa, Gossypium hirsutum
  Clone ID: uC-gsflnu33B081h05b1.pep
MVLYECLANGDLHRWLHELPTGAPNVEDWSTDTWDMHNGIGSHTSSPDKTNWLTRHRIAVGVARGVAYLHHVCSRHGHLEASNILLSDNLEPWIS

SEQ ID NO: 113536 - protein, 66 aa, Gossypium hirsutum
  Clone ID: uC-gsflnu33B082a06b1.pep
SDQDHQIQKDHLCHLHLKNPKPGNLHLLEELMDLQKDPPTSCSAGPVTEDMFYWQATIMGPSDSPY

SEQ ID NO: 113537 - protein, 55 aa, Gossypium hirsutum
  Clone ID: uC-gsflnu33B082c05b1.pep
GAYNHPIAFIVLCFLQFLGGFLFFMFLFFIFLFFDKTNCLIYSINLSCHAMHIEV

SEQ ID NO: 113538 - protein, 109 aa, Gossypium hirsutum
  Clone ID: uC-gsflnu33B082c12b1.pep
PQLALSVFRLFIRACLADSIVFRSKPLFQLKSCSHTGEFWPLMPRYRHSLGLLACLLDISVWSILSPCVSDDSTPLPHPFVVQYVAVVGVMQWHVVFRGRRLAYGSALG

SEQ ID NO: 113539 - protein, 103 aa, Gossypium hirsutum
  unsure (1)..(103): unsure at all Xaa locations
  Clone ID: uC-gsflnu33B082f04b1.pep
QDAISLATEPVSNYILGWLHKTAGSSVPTQGXIGMVPGPMMTAFPISKLAPLSMVILLXSIRTPNFTGALRLGPYVQPLRIRYTFXIKNPKRPSIYYGSWIGI

SEQ ID NO: 113540 - protein, 73 aa, Gossypium hirsutum
  Clone ID: uC-gsflnu33B082f09b1.pep
MLLLGEMKYSFSFFLQVQTIKQGYLLKRSSSRGDWKRRFFVLDSRGSLYYYRNKGIKPMVCVNILLLSLIDHV

SEQ ID NO: 113541 - protein, 133 aa, Gossypium hirsutum
  unsure (1)..(133): unsure at all Xaa locations
  Clone ID: uC-gsflnu33B082g05b1.pep
PRGRLFFRPRDRAGRGAYMGVMLYMFGNYXESYNSFSSAIAKLPISGDEKCAFFGLALNQMGLACAQRSAIKEAVELIDRSXISCLEREXCGPIHPGTLREYSNLACTYDAVGRVGDAIEILEYVVQTREEKL

SEQ ID NO: 113542 - protein, 58 aa, Gossypium hirsutum
  Clone ID: uC-gsflnu33B082h07b1.pep
IAVGDHETLLQFFKLGCLRRNKPTYDCSFLLSLLLCSINPHLHFLMLQQCNSNVFSIE

SEQ ID NO: 113543 - protein, 116 aa, Gossypium hirsutum
  unsure (1)..(116): unsure at all Xaa locations
  Clone ID: uC-gsflnu33B083a02b1.pep
MIPQLSAAALSIAQLQARGFEEPAKQNQLYKKHYPPMLGDEVWRLDRIGKNGIIHVRLASEGINTVQDFLRMSVVSPGELRRILGPRMSERMWDNAIKHAKXCVMGNHIMFFEAQL

SEQ ID NO: 113544 - protein, 65 aa, Gossypium hirsutum
  unsure (1)..(65): unsure at all Xaa locations
  Clone ID: uC-gsflnu33B083a06b1.pep
MAAEQPRSATDDVKMDLFEDDDXFEEFESDXXWEDKEEGKVFTQQWEDDWDDDDVTDDFCLQLLR

SEQ ID NO: 113545 - protein, 54 aa, Gossypium hirsutum
  unsure (1)..(54): unsure at all Xaa locations
  Clone ID: uC-gsflnu33B083b10b1.pep
RACRHPSYKITPPLKLKFCYLFFSKIIAFFKSVHPVLVFYFFFFFFFFFFFXNM

SEQ ID NO: 113546 - protein, 76 aa, Gossypium hirsutum
  Clone ID: uC-gsflnu33B083c03b1.pep
PRVRLLVNQARILSKSPLSLSLSLSRCLSVAVSLGGALWMAVEEGGMGGGIRLGEWRIWEEGEVSVKKESRANDVG

SEQ ID NO: 113547 - protein, 89 aa, Gossypium hirsutum
  Clone ID: uC-gsflnu33B083d03b1.pep
EEPPAGTGREGMAGPTHAFVYTCHRFYKGGGNKDFVSPLSHLLTRYKITSGFQENKEDGAGKLRIKQRKKGVAIRQKNKERKQKSNVIS

SEQ ID NO: 113548 - protein, 111 aa, Gossypium hirsutum
  Clone ID: uC-gsflnu33B083e02b1.pep
APHGDHSYVRVSIHLLLPHVPSISEVKGGSELLDNDDRCSLFAAVSTTRDLIRIPRFEGAITAILPAVLTTATLIWIPPVRIPSSSTTFRYAPFPFLPSLSHPLREQIQNH

SEQ ID NO: 113549 - protein, 94 aa, Gossypium hirsutum
  Clone ID: uC-gsflnu33B083e06b1.pep
LCGVETEAGASDESLVSGGNKGLTASSTGGARNYAGDHIMDRSINTCRNTRTRWVTCTQGLCYRPDQPRTLTGCMPAKHAQTHTGKGSRKRRLP

SEQ ID NO: 113550 - protein, 93 aa, Gossypium hirsutum
  unsure (1)..(93): unsure at all Xaa locations
  Clone ID: uC-gsflnu33B083e08b1.pep
RGPMGPKTLCNACGVRYKSGRLVPEYRPASSPTFVSTEHSNSHRKVLEIRRQKDMQRGGQGTRFLSQTSVFPISNGXDVADDFLIHHHGGPRF

SEQ ID NO: 113551 - protein, 54 aa, Gossypium hirsutum
  Clone ID: uC-gsflnu33B083g04b1.pep
PFLLVLFFSGTVPFFSSFICSYCFCAFFNKTQKIINAKTQFFLQAHITLPQITK

SEQ ID NO: 113552 - protein, 126 aa, Gossypium hirsutum
  unsure (1)..(126): unsure at all Xaa locations
  Clone ID: uC-gsflnu33B083g10b1.pep
RIDDLVANSMNILEPASVDADGNAREDVMHANDPVDLFILPGLAFDRSGRRLGRGGGYYDTFLKNYKELAKEKNWRLPLFVALSYSVQIMDEEVIPVTPNDVLVDALXSPTGVIPITSAALGRMKP

SEQ ID NO: 113553 - protein, 53 aa, Gossypium hirsutum
  Clone ID: uC-gsflnu33B083h01b1.pep
IFGFLNGRFQRKGFFTLLNMDFFCSVGFALHRIWILQFFIESIGFVLCIYCCS

SEQ ID NO: 113554 - protein, 40 aa, Gossypium hirsutum
  Clone ID: uC-gsflnu33B084a07b1.pep
YSNICTSYKSPEKWNYLWYKTKITVKNEDLQYQDARIVSL

SEQ ID NO: 113555 - protein, 45 aa, Gossypium hirsutum
  Clone ID: uC-gsflnu33B084a08b1.pep
MTLNRSVLQKINSYITYEILPHYQMRHKHTNLDAQAHKYKEETLV

SEQ ID NO: 113556 - protein, 77 aa, Gossypium hirsutum
  Clone ID: uC-gsflnu33B084a09b1.pep
GGGPRKLRWGTAGVCRATGWESAAPRGLSLGTPWKEEGPFKGQGGEMEPRERPAGSTYYVVVFFLFFFFCDLIAFFV

SEQ ID NO: 113557 - protein, 53 aa, Gossypium hirsutum
  Clone ID: uC-gsflnu33B084c01b1.pep
KEALSLSDKDGEGCITTKERGTVTRSLGQNPTEAEPHGMIKEGDADQNEHQRT

SEQ ID NO: 113558 - protein, 37 aa, Gossypium hirsutum
  Clone ID: uC-gsflnu33B084e01b1.pep
PQTIDRLEPVNTNPFPSWCNNAERFQQFPHDFCILAR

SEQ ID NO: 113559 - protein, 134 aa, Gossypium hirsutum
  Clone ID: uC-gsflnu33B084e03b1.pep
CYSTPLVDIFMQACNDMVDFHIAGFFQALHSEDSYLRIQDDTLSQQMSTLDIATKENLENLVKVGQELLKKPVSRVNLENGQFEPAGTVTNEDALIRLAEVLSMEKRLLDMRSPLGNFAMKENKGCAQINNTMT

SEQ ID NO: 113560 - protein, 88 aa, Gossypium hirsutum
  Clone ID: uC-gsflnu33B084f06b1.pep
LFLILRYLTFGIEPIPRKNHQSNHYSNINVKLVRFAYCFVICNHCIIRETKVDARHISSPIPISNTVGCYETSFEMVKSCQLKTRVDA

SEQ ID NO: 113561 - protein, 58 aa, Gossypium hirsutum
  Clone ID: uC-gsflnu33B084g12b1.pep
ELAPCFYEGFQLPSSFIYWRLPVASWPYMRTRVFISRSLMKMILWVSCSFPSMPLKLR

SEQ ID NO: 113562 - protein, 113 aa, Gossypium hirsutum
  Clone ID: uC-gsflnu33B084h10b1.pep
RSPKAHFLKINFDVAFKAHIAKSYSGLVIKDDRSRIIGTRVILNEYVLSVFVAEALTCLQAVKLGVEMGLREVVIEGDSLTVIKKAKSGPMDRSEIWTFIQDIKIEQRKFREV

SEQ ID NO: 113563 - protein, 110 aa, Gossypium hirsutum
  Clone ID: uC-gsflnu33B085a02b1.pep
VHWASTSLAIGSLHASTSSSEGPGYASCSFIWQSIPRVSLPFILSTLSPSYVAIMADSPSIACSSNANALSYRQFLPLRATLVLCPVISSIVVSSESCNPILCRSRVETD

SEQ ID NO: 113564 - protein, 63 aa, Gossypium hirsutum
  Clone ID: uC-gsflnu33B085a12b1.pep
GDLSPVLSPFYVRRWADFDCGQGTLLAVISFPFVRICECAPAWPRPYDDSDDAVAPTLLPCVF

SEQ ID NO: 113565 - protein, 71 aa, Gossypium hirsutum
  unsure (1)..(71): unsure at all Xaa locations
  Clone ID: uC-gsflnu33B085b10b1.pep
KNATKSVETYKIYMSXVLKQVHPDMRISSNAMGIMNRFINDFSEKLAHEAPRLARYIKMPTITSWEDQDRC

SEQ ID NO: 113566 - protein, 38 aa, Gossypium hirsutum
  Clone ID: uC-gsflnu33B085d02b1.pep
IANSAHSTSNYPPDSKCMPTIDRKSFINHAQGHISMLE

SEQ ID NO: 113567 - protein, 62 aa, Gossypium hirsutum
  Clone ID: uC-gsflnu33B085e08b1.pep
FPGFRTAMSAGRERTITCYFDTTHTGNTASCTAASGPAKMPQTTLLSLGAYAHVPSVDDTTA

SEQ ID NO: 113568 - protein, 66 aa, Gossypium hirsutum
  Clone ID: uC-gsflnu33B085e10b1.pep
SPCKLDLHEGRLSTLVTVKGGTSHFILCTYGLADGSIIIAAFSFGVDRKSGPVMPVAIFVGLWVLT

SEQ ID NO: 113569 - protein, 66 aa, Gossypium hirsutum
  Clone ID: uC-gsflnu33B085f03b1.pep
RKNGTWRWHLLKRSCGQLMWRFRLPENADTCQSKASMRHMVACCKCSQTGRETPRCQGYRHFWLND

SEQ ID NO: 113570 - protein, 67 aa, Gossypium hirsutum
  Clone ID: uC-gsflnu33B085f04b1.pep
LVLVRRVGLLSKVEGLDIYNDIPIIMLYQLNCIHRLIIIACLSFVLILETFNNSLRHTHCQYLQLQH

SEQ ID NO: 113571 - protein, 46 aa, Gossypium hirsutum
  Clone ID: uC-gsflnu33B085h09b1.pep
FQQPPYLNPFKGYLHIVVYMTHPARRRKMKEHTKRLRTFIGPESTL

SEQ ID NO: 113572 - protein, 33 aa, Gossypium hirsutum
  Clone ID: uC-gsflnu33B088a09b1.pep
VNFCILTQPNLMSLYWLFLVNILTTCLYALLRL

SEQ ID NO: 113573 - protein, 56 aa, Gossypium hirsutum
  Clone ID: uC-gsflnu33B088b09b1.pep
LIVKRFPLLLKVFANHSPVILLFQISLAARKLSEVVQDQPQLLTYPNGPLLSAKFS

SEQ ID NO: 113574 - protein, 53 aa, Gossypium hirsutum
  Clone ID: uC-gsflnu33B088c02b1.pep
YFPGVKEYLQNGGFKKNVPFLQELVVMEGVAHFINQEKPQEISMHIYDFIKKF

SEQ ID NO: 113575 - protein, 101 aa, Gossypium hirsutum
  unsure (1)..(101): unsure at all Xaa locations
  Clone ID: uC-gsflnu33B088c09b1.pep
MDFAGTWNCRGMYNIVCSFNRAYQEFDGAATNVLETMESXAAQKTVATDAAXENSTEKWXMMQSGXDRAEELCKCIKHRIGSXCIVDEATGYIRRKVMIVL

SEQ ID NO: 113576 - protein, 82 aa, Gossypium hirsutum
  unsure (1)..(82): unsure at all Xaa locations
  Clone ID: uC-gsflnu33B088d05b1.pep
MRPVECRICQDEDVDSNMETPCACCGSLKYAHCRCVQRWCNEKGNTTCEICHXQFRPGYTAPPPSFHIGRIPMNFRGNLGDI

SEQ ID NO: 113577 - protein, 102 aa, Gossypium hirsutum
  Clone ID: uC-gsflnu33B088d06b1.pep
CFLSGSLDKSAKLWDTRTLTLIKTYGTERPVNAVAMSPLLDHVVLGGGQDASAVTTTDHCAGKFEAKFYDKILQEEIGGVKGHFGPIKALAFNPDGKSFSSG

SEQ ID NO: 113578 - protein, 35 aa, Gossypium hirsutum
  Clone ID: uC-gsflnu33B088d07b1.pep
ELKGLFGKIRKKNGIELKTKKSQWINMMLLTISFM

SEQ ID NO: 113579 - protein, 164 aa, Gossypium hirsutum
  Clone ID: uC-gsflnu33B088e04b1.pep
GLSNFIPVLIGDKDVCSEMKVIQQGFDASLFWGGSQISANRSSCETSTLRQKAYSELVLDIAWLLREPKSENFQETMASSQIQRFNCLLNFLIQNKSTVILKKVLQNLKNVMEEAGFNGTDDPDTRLLKKYMDYGRDILNNKLQEGERPVLLSEYIEQEGKWNS

SEQ ID NO: 113580 - protein, 78 aa, Gossypium hirsutum
  Clone ID: uC-gsflnu33B088e05b1.pep
QLTCYCLVFIGSVMDIIQLHCLVSGIGAHDIGRGNEDKIKSIEGLNGRSLERPLYRKRGTNMPLWFLEPYRNHVLLAI

SEQ ID NO: 113581 - protein, 81 aa, Gossypium hirsutum
  Clone ID: uC-gsflnu33B088e11b1.pep
SPPSPWLKPSTEEEPFLSGFPAEKACPSKHVFLNQGKTPFGTAPTTVHGGGATVMVAAHEWVSFETLAENKWGKRECSDAW

SEQ ID NO: 113582 - protein, 97 aa, Gossypium hirsutum
  unsure (1)..(97): unsure at all Xaa locations
  Clone ID: uC-gsflnu33B088f01b1.pep
MLSYLWHQLHRVLAAQPCHYHLLLIPCPLMPEEVGLLLRALGYPSKTIIYLAGSKTFGGQRLLIPLRAIAXNLVHRTTLCSKTDLSDLVRSEAPLPA

SEQ ID NO: 113583 - protein, 69 aa, Gossypium hirsutum
  Clone ID: uC-gsflnu33B088f03b1.pep
VISYPTIGDAPHMKVIADENPMRVRNATQTLDLHYEAVADGVAQPAEQRRAVIEKEQMEKASAAVAAPS

SEQ ID NO: 113584 - protein, 70 aa, Gossypium hirsutum
  Clone ID: uC-gsflnu33B088f07b1.pep
MGNSFFLGILVTISLCLQLFGGGAYGLGVNWGTMASHKLPPKTVVHMLKDNGIKKVKLFDADSTTMNALA

SEQ ID NO: 113585 - protein, 60 aa, Gossypium hirsutum
  Clone ID: uC-gsflnu33B088f09b1.pep
PRVRPRVRSCVEFVFSYCLHVGNFLFGFVPLLFLLFFFVEEAEPHEICKFTSNFSIVDKF

SEQ ID NO: 113586 - protein, 56 aa, Gossypium hirsutum
  Clone ID: uC-gsflnu33B088g01b1.pep
FIRSLCLSLLSCLSLLIIEARSFYIYNVNMKVILTLINKKKPIKWCKVYYIDKLSR

SEQ ID NO: 113587 - protein, 74 aa, Gossypium hirsutum
  Clone ID: uC-gsflnu33B088g05b1.pep
SFDAYMGIPCSWMRRNGQASNPSHEFVSFKRSSNVNTKKLPVTTLFLHGFATNTGHRIWHPSSVSRFGVWLILP

SEQ ID NO: 113588 - protein, 77 aa, Gossypium hirsutum
  unsure (1)..(77): unsure at all Xaa locations
  Clone ID: uC-gsflnu33B088h02b1.pep
SLVTGAAVDRAHNGLFKRLSLWELMIAELLAKGPRDAQNAMLSGGADGGXGVILHCNRLLALQPVTAKVKCMPEAGL

SEQ ID NO: 113589 - protein, 128 aa, Gossypium hirsutum
  Clone ID: uC-gsflnu33B088h03b1.pep
MVERDQVRPLAPAADAPTSDDGEAALQLKKVRRKKLIRCCACIAALFIILAVVIIVLIFTVFRVKDPIIKLNAVSLTNLDLINAFIPTTGANISLIANVCVKNPNIASFKYRNTTTTLYYYRNEIGDA

SEQ ID NO: 113590 - protein, 69 aa, Gossypium hirsutum
  Clone ID: uC-gsflnu33B088h06b1.pep
TRHQIEQRWLVSSKLGLFSSKQERLTGKLVLPSTIPDKNGFSSWIDSSNIGEKKEAQSENHVRLIKKCT

SEQ ID NO: 113591 - protein, 60 aa, Gossypium hirsutum
  Clone ID: uC-gsflnu33B089a07b1.pep
CYLKVADFGVSKLLKVANRVKEDKPVTSQETSCKFSTLGKTLYPPSLSIYTWGFACELLD

SEQ ID NO: 113592 - protein, 38 aa, Gossypium hirsutum
  Clone ID: uC-gsflnu33B089a10b1.pep
PHQVFKVNRLWSMEQCMQGRLAKWTLNLGKRIGSEGWA

SEQ ID NO: 113593 - protein, 160 aa, Gossypium hirsutum
  unsure (1)..(160): unsure at all Xaa locations
  Clone ID: uC-gsflnu33B089b01b1.pep
SSATATPNSSSTTMTPPPSTTPSRYENQKRRDWNTFCQYLRNHRPPLSLSMCSGVHVLEFLRYLDQFGKTKVHNQTCPFYGLPNPPAPCPCPLRQAWGSLDALIGRLRAAYEEHGGRSEGNPFXARAVRIYLREVRDFQAKARGGSYEKKRKRPKLKVPV

SEQ ID NO: 113594 - protein, 54 aa, Gossypium hirsutum
  Clone ID: uC-gsflnu33B089b06b1.pep
RIDVDGGPAAKALKPKFNVFSKTVTSHTGVQVPEFDIKYFVAGAVAFKGDGGAN

SEQ ID NO: 113595 - protein, 70 aa, Gossypium hirsutum
  Clone ID: uC-gsflnu33B089b07b1.pep
IYVHGIPTCKKKKKKKKKKKKKKKKKKKKKKKKKKKKKKKKKKKKKKKKKKKKKKKKGGAPYKKPNLSLP

SEQ ID NO: 113596 - protein, 101 aa, Gossypium hirsutum
  Clone ID: uC-gsflnu33B089b09b1.pep
DRNIILNDWYHKSTYEQAAGLSAIPFQWVGEPQSLLIHGRGKFNCSTLTTPSLDAGICNATNPDCEPFRLIAVPGKTYRLRISSLTALSVLSFQIEGHNYD

SEQ ID NO: 113597 - protein, 37 aa, Gossypium hirsutum
  Clone ID: uC-gsflnu33B089c04b1.pep
SCLFLAHGVTFRVSAAFPWVLHRTVLGSISSKSPPMH

SEQ ID NO: 113598 - protein, 127 aa, Gossypium hirsutum
  Clone ID: uC-gsflnu33B089c11b1.pep
CYASGEIGKKNHLFVEMENRFRLRISRMFRSSFGSCRTRNVSDVAEKVVPSLENHNRFRCMESSSTPPPKVRPLPSICKPRYPESHQPTQGTRRKVSACYPPFLLSATDFDGRKCPSASPISPLNLF

SEQ ID NO: 113599 - protein, 65 aa, Gossypium hirsutum
  Clone ID: uC-gsflnu33B089d08b1.pep
VNLLSSTATASAPGGPRFFRSVTPLFLIPSVAIRWAPLSACISLSSRYVSRSWTLLVTVYMHKIF

SEQ ID NO: 113600 - protein, 69 aa, Gossypium hirsutum
  Clone ID: uC-gsflnu33B089f06b1.pep
VLFDIGHEEDMVIELANEVRKVLATLGNGVSKEKQLVGSPLKMPLKSQTQTYIPTSQLLLLPKAVAMDS

SEQ ID NO: 113601 - protein, 65 aa, Gossypium hirsutum
  Clone ID: uC-gsflnu33B089f07b1.pep
AYQYSNSFVHSIPKGKASPFPVSGIKLHFASTSGTFLPSQESISKDLFSKCRIPLANTVGMYFIQ

SEQ ID NO: 113602 - protein, 53 aa, Gossypium hirsutum
  Clone ID: uC-gsflnu33B089f11b1.pep
ASRVRFIWAKANLITRQRQISLSKMDRNQDQNAIVGVVASVLAFGLSGLKIKN

SEQ ID NO: 113603 - protein, 65 aa, Gossypium hirsutum
  Clone ID: uC-gsflnu33B089h09b1.pep
GVCEYPNVFPEELLGLPPIRELEFGIELMLGTTSISIPSYRMAPTELKELKLYPVCCTLSVVLSI

SEQ ID NO: 113604 - protein, 85 aa, Gossypium hirsutum
  Clone ID: uC-gsflnu33B090a06b1.pep
LLSLSLKCAKIEALEKRVDMEMGKHLNLVQVNKTLTLNTSKKLALPCAFQALMNFSKASVQVFEAIHGHAQPEIPCNEASETSAN

SEQ ID NO: 113605 - protein, 165 aa, Gossypium hirsutum
  Clone ID: uC-gsflnu33B090a07b1.pep
WYRNILQHDLRVSSDYVSKLVGHKSEVCGLKWSHDDRELASGGNDNQLLVWNQHSQQPILKLTEHTAAVKAIAWSPHQSNLLASGGGTADRCIRFWNTTNGHQLNNIDTGSQVCNLSWSKNVNEIVSTHGYSQNQIMVWKYPSMAKVATLTGHSFRVLYLAMSPD

SEQ ID NO: 113606 - protein, 74 aa, Gossypium hirsutum
  Clone ID: uC-gsflnu33B090b08b1.pep
LRVRNDNRASINLFTDKCGYSRFRTPAILVNPVFVHRLTVSNQVTVIELSLSRRRVVVPLRVYTNKFNQARVNG

SEQ ID NO: 113607 - protein, 50 aa, Gossypium hirsutum
  Clone ID: uC-gsflnu33B090c07b1.pep
LSPNFPPFLRKIKASIPQGSAKPIPIHGHQKAQSAGIVSEHNHTIPQSFW

SEQ ID NO: 113608 - protein, 122 aa, Gossypium hirsutum
  Clone ID: uC-gsflnu33B090d05b1.pep
LTLTANNIAQICYLDALRFGLKRIFFAGFFIRGHAYTMDTLSVAVNFWSKGEAEAMLLRHEGFLGALGAFMSYEKQGLDGLTVNKVPQRIPISVCSAGNKIYCSMNGKSNGNESIECTVYGT

SEQ ID NO: 113609 - protein, 119 aa, Gossypium hirsutum
  Clone ID: uC-gsflnu33B090d10b1.pep
FLRVRGTLYRQVVGSLQYLCLTRPDLSFAVNKVSQYMHQPHDVHWTAVKCILRYVKGTIDHRLLFQASGLSLTGFSDADWASSLEDRKSTSGFCIYLGDNLVGWMSKKQSVVIRSTTEA

SEQ ID NO: 113610 - protein, 40 aa, Gossypium hirsutum
  Clone ID: uC-gsflnu33B090e06b1.pep
LLPSIAYTGPSLYVEPPNTTPFATVTGPLTVPLVGSAVDK

SEQ ID NO: 113611 - protein, 164 aa, Gossypium hirsutum
  Clone ID: uC-gsflnu33B090e09b1.pep
ELGHIVESPIIRTATSIVPLGWNGIPGEKSTEQLKVDITGFRLHMCTLVHAQVNGKWCSTTVESFPSAPDYSAGSGEPPELQKIRVLVGAPLRRPPKHQTLADSLMTMFPSINSETVNLNKEHDMASSHQEKYVRPEGLSDFFIFCTSDFSTASKEVHVRTRRV

SEQ ID NO: 113612 - protein, 123 aa, Gossypium hirsutum
  Clone ID: uC-gsflnu33B090g06b1.pep
HGYGTNTGTLSTALFTNGLSCGPSYEIKCANDGTRCLPGSIAGTVTNTCPTNNALTNNAGGRCNPSLHHFDLHQAVFQHIAQHKAGIEPVIYRRVPCRRKGGIKFTINGHFYCNLDLIRNVSS

SEQ ID NO: 113613 - protein, 103 aa, Gossypium hirsutum
  unsure (1)..(103): unsure at all Xaa locations
  Clone ID: uC-gsflnu33B090g07b1.pep
SWVYIRRIMNGEEATVWKAMTKTPASIVLIIYXQSTYENFRYRYDRHENPYNKGVIRNFLEVFCTSVPPSKINLREKVPKEPVIAPRTVSGGFISPFNGKAIW

SEQ ID NO: 113614 - protein, 85 aa, Gossypium hirsutum
  Clone ID: uC-gsflnu33B090g12b1.pep
QIFEKTTKGAPSKIEPPWEKGHRSQKHKFGDPPGSPLSTRGKHRPAYLTCAPQIKASEAEKRARKTWAPKTSPPLFCYFIRITSV

SEQ ID NO: 113615 - protein, 31 aa, Gossypium hirsutum
  Clone ID: uC-gsflnu33B090h02b1.pep
HPLGGKHENVTNEGFFFVRKVKRKSCFVLLN

SEQ ID NO: 113616 - protein, 55 aa, Gossypium hirsutum
  Clone ID: uC-gsflnu33B090h10b1.pep
LTRPKVVTVVEEEADFSSTRYDFVKCFEECLRFYTVYFEMLEESFTPTSNEKLML

SEQ ID NO: 113617 - protein, 147 aa, Gossypium hirsutum
  unsure (1)..(147): unsure at all Xaa locations
  Clone ID: uC-gsflnu33B090h11b1.pep
IFLYWDGVRPELVISEPELIKEVLKNSEKTFPKRKPTIFINKLLGDGLVTVEGEKWVKXRKLANNVFHGESLKDMRPAIIASVETMLKKWKGQVGKEIEVFHEFXLLTSEVISRTAFGSSYLEGEKIFEMLNKLSIVLSRNLSTLEF

SEQ ID NO: 113618 - protein, 71 aa, Gossypium hirsutum
  unsure (1)..(71): unsure at all Xaa locations
  Clone ID: uC-gsflnu33B091a10b1.pep
PPKKKSKTKREKIKNKWEQEPRTELAFETIHADGEREIMSYRNPSADMLQTPEEXNPDPKRPIKEDHYGAI

SEQ ID NO: 113619 - protein, 88 aa, Gossypium hirsutum
  Clone ID: uC-gsflnu33B091a11b1.pep
CTETGTRRFHSNGPGGTNHRALAARKRGPLRKQSHSLQKAGYDACTSSRNTPVIGVACHIQRATADLLTHVPFRSLCLFPLSYERPPF

SEQ ID NO: 113620 - protein, 60 aa, Gossypium hirsutum
  Clone ID: uC-gsflnu33B091a12b1.pep
TCRCWHEVRFIDMGSTVVFPVWSLWITGRSIASTFPYAVVIWSQSRVCKSPSSRTVAGGV

SEQ ID NO: 113621 - protein, 96 aa, Gossypium hirsutum
  Clone ID: uC-gsflnu33B091b03b1.pep
FNEAIIEEREQGIKEVQQQISEVNEIFKDLADLVHVQGGMIDDIGSNIENSHSGTVQAISHLKRASKIQRANSSTRCLLVLIFGIILLIFIIVVVA

SEQ ID NO: 113622 - protein, 73 aa, Gossypium hirsutum
  Clone ID: uC-gsflnu33B091b08b1.pep
LQSFYIGVSFKQPIVYTSIDRIAGFKIKLAYVDLCLIFLLFLFSLFIRFFFRLALMVKRLRSLISFPSSGPLV

SEQ ID NO: 113623 - protein, 90 aa, Gossypium hirsutum
  Clone ID: uC-gsflnu33B091b11b1.pep
CPRVRPRVRNGGSVLNDPEEQRRRMVEQLEQAHARGEKEKQLDEEFLDAMDQGMPPAGGLGIGVDRLIMLLTNAPSIRDVILFPARRNKD

SEQ ID NO: 113624 - protein, 70 aa, Gossypium hirsutum
  unsure (1)..(70): unsure at all Xaa locations
  Clone ID: uC-gsflnu33B091c03b1.pep
FEDRLMKWTFKTVKRYRERWCMFNDNLQATAGVALAVLLGTVRXQGGSLDDFPNHMIVMERARSAGIAVL

SEQ ID NO: 113625 - protein, 66 aa, Gossypium hirsutum
  Clone ID: uC-gsflnu33B091c07b1.pep
MDFLTAVTYSRPKLVILHMNMALHVYEDIMRVTENLSEKYIIGSGASSTVYKCVLKNCRPVAIKRL

SEQ ID NO: 113626 - protein, 110 aa, Gossypium hirsutum
  Clone ID: uC-gsflnu33B091d04b1.pep
MERKGLVLCSVVAFLGVLSAATGFAAEATRIKASEVKFVSTTQCSYPRSPALGLGLTAAAALLVAHIIINIPTGCICCKRTSRSWNSYWTKALVFYVISWFTFVIAFPLL

SEQ ID NO: 113627 - protein, 56 aa, Gossypium hirsutum
  Clone ID: uC-gsflnu33B091d08b1.pep
SDRSAMNNGGAESSGALSSLHELRSALAIGFKIRAFCCTVCFWTSSNYLWSILTEI

SEQ ID NO: 113628 - protein, 46 aa, Gossypium hirsutum
  Clone ID: uC-gsflnu33B091d09b1.pep
FEMKFRYLIRSSYLAYICRALFIFCSVWNRGPFNLPMHIGGYRTRG

SEQ ID NO: 113629 - protein, 79 aa, Gossypium hirsutum
  unsure (1)..(79): unsure at all Xaa locations
  Clone ID: uC-gsflnu33B091e10b1.pep
ETHTLLDRAQLYQIHGEVDKCGSCDCTDKSQCVMKGNSLVIETEESYISTDMKKPLSXNDGKCKGGTSCSYTNCTCGRH

SEQ ID NO: 113630 - protein, 53 aa, Gossypium hirsutum
  Clone ID: uC-gsflnu33B091g09b1.pep
ASTRQLYCSIYHNSIAEETQVLKYIKNPLKAGPLIAWICKYTPQIRQRFSHFR

SEQ ID NO: 113631 - protein, 104 aa, Gossypium hirsutum
  Clone ID: uC-gsflnu33B091h01b1.pep
FEYTRLKALKMAFSFFRSFPISSFPVHSKSKRFSYDGSSFHRLIISFASQCEATNKISIEDDIVIRRSANYDPSIWDYDYIQSLRNDFVQDESYKERASKLRKK

SEQ ID NO: 113632 - protein, 75 aa, Gossypium hirsutum
  Clone ID: uC-gsflnu33B091h03b1.pep
NNYLFLPFPFLSYFCVFLSFNSRQGGVQSHISFLFFFVSHPTNTNILLSMLFILLFPPMMHQHNMSMTCFAGRVR

SEQ ID NO: 113633 - protein, 101 aa, Gossypium hirsutum
  unsure (1)..(101): unsure at all Xaa locations
  Clone ID: uC-gsflnu33B092a01b1.pep
MQQDRGGRGSEQGMKQNQQQDQRLKPLTGENQQQHPPQKCPRXEYVNTKFRYYNNYRLSQPRYFCKTCRRYWTQGGTLRNVPLGGGCRKGKRTKVISYGEN

SEQ ID NO: 113634 - protein, 67 aa, Gossypium hirsutum
  unsure (1)..(67): unsure at all Xaa locations
  Clone ID: uC-gsflnu33B092b03b1.pep
HSFGNTVSVPVGGWAVIRFVANNPGVWFMHCHFDGHMSIGLSTAFIVENGPTSDTTLPXPPTDLXQC

SEQ ID NO: 113635 - protein, 58 aa, Gossypium hirsutum
  Clone ID: uC-gsflnu33B092b05b1.pep
SHFNSVPPIYQVTPLFFKKKLEKTLTGGTITLEVQELRTLTYDCIEDLRRGIDSLKLA

SEQ ID NO: 113636 - protein, 145 aa, Gossypium hirsutum
  unsure (1)..(145): unsure at all Xaa locations
  Clone ID: uC-gsflnu33B092b10b1.pep
YSHVTAEFYNDDGAMVAVGAHTSLISTQHDETVSYDDIAADLTEHVINPVIPEKCLDEKTIXHLNPSGRFGIGGPHGDAGLTGREIIIDTHGGWXAHSGGAFYGKDPTKVGRSGPYVVRHAAESIVTNGLAQRCIVHVSYAIGVP

SEQ ID NO: 113637 - protein, 34 aa, Gossypium hirsutum
  unsure (1)..(34): unsure at all Xaa locations
  Clone ID: uC-gsflnu33B092b12b1.pep
KXGTIKKSRVFLSFAATNCSSSFYILWDHRRKAV

SEQ ID NO: 113638 - protein, 132 aa, Gossypium hirsutum
  Clone ID: uC-gsflnu33B092d03b1.pep
PPDGSPTMKATLEDNLPEDEPRDMDMAVARTPVNTQPRKEKPEPKPPVYEPPKKEKPKPKPPVYSPPKKEKPEPKPPVYQPPKKPPVYEPKPPKPPVYVPPKKEKPGPKPPVYGTSKKPRMVTIQDTLHWGS

SEQ ID NO: 113639 - protein, 43 aa, Gossypium hirsutum
  Clone ID: uC-gsflnu33B092e06b1.pep
KRTSSIMAISGYNHRHKYITVGLSILAHISLQMPVLLAALLFS

SEQ ID NO: 113640 - protein, 64 aa, Gossypium hirsutum
  Clone ID: uC-gsflnu33B092e07b1.pep
TRPEQGALIDDIGTHIENSQAATVQAKSHLVKAAKIQRSSSSLACLLLVIFGIVLLIVIVVLAA

SEQ ID NO: 113641 - protein, 86 aa, Gossypium hirsutum
  Clone ID: uC-gsflnu33B092f04b1.pep
LSPCVHLVKESAVLAMAVPRTHFQYCLQSLISIIASPILLQHVDSKFVNYNLKSVAKERTRIDPPHNPSIFWLRACSKSKLVWTIN

SEQ ID NO: 113642 - protein, 47 aa, Gossypium hirsutum
  Clone ID: uC-gsflnu33B092g05b1.pep
WKKICSIVFVVYNTFASFTCLGPYCRLLSRHFELVHDFSLRSSNSGV

SEQ ID NO: 113643 - protein, 94 aa, Gossypium hirsutum
  Clone ID: uC-gsflnu33B092h11b1.pep
MAAINVSPLFTSSSSLRTFSSYAPQNTPTLSLNSRFAPSLSFPSFSLRPPISTKTRSLIIASAVKNLSEVEPIPVPALPRYLPLSSLLMLESTP

SEQ ID NO: 113644 - protein, 114 aa, Gossypium hirsutum
  Clone ID: uC-gsflnu33B093a06b1.pep
KAPSQNRVGAPTNLWGGHGGVSSPVGTPGGPGGFSGGPSWERSGGNAGGGSWGPPECTPHHAVCKRGVCQCCPAKLIVVLYSCSFLFVFLVKLDLSFFFFFFFFFFFFFFFFYI

SEQ ID NO: 113645 - protein, 143 aa, Gossypium hirsutum
  Clone ID: uC-gsflnu33B093b03b1.pep
PPDNDPLQGGAQWPIRVDPRLERPPGGALLVITHLAKRGIVSKPIKWGTPRFFPPQRWKTAAHEMKLRAPKKKVLPGKPGEINLDPLKRPPPYIKVISFHALVPNSWVLSERSALFFFFFFFFFFFFFFFFRTRGRTRGRTRG

SEQ ID NO: 113646 - protein, 93 aa, Gossypium hirsutum
  Clone ID: uC-gsflnu33B093b04b1.pep
RPRVRPRVRPRVRFTDSFLVSFTFFTFVNFLVLLPAYVYTYTYIHTYMVSFLDFELFYLLLLCDLTFYTQLGLNIYYKRFYLKQIHEYLSVFP

SEQ ID NO: 113647 - protein, 63 aa, Gossypium hirsutum
  unsure (1)..(63): unsure at all Xaa locations
  Clone ID: uC-gsflnu33B093b08b1.pep
HTVLTNQEKKELLDKYRVXETQLPRILVSDPVAXYYGVKRRHVVKLTRHSVTADTYETYRYAG

SEQ ID NO: 113648 - protein, 151 aa, Gossypium hirsutum
  Clone ID: uC-gsflnu33B093b09b1.pep
LISDAVADGDDAEKVPQSGHYKEESTRVADLLENEKKAVEELKVLVREALNKHEFGGFAMPQQQQQQQQQQQQQPKDDSAKEEPKPKAEAVTETVAETKEESIAQAETGDDEEKVATATIRSDAVEDDGAKTVEAIEDTIVSVSASVQPEQ

SEQ ID NO: 113649 - protein, 146 aa, Gossypium hirsutum
  Clone ID: uC-gsflnu33B093b11b1.pep
FTRPVFQAKIMPYSDDRSLVTCAADGQVRHAQILERGVETKLLAKHQGRAHKVVIEPGSPYIFYTCGEDGLVQHIDLRTAASTELFTCRPVDDSRAYMPFIHLNAIAIDPRNPNLFAVAGSDEYTRLYDIRKYKWDGSHDIGQPTD

SEQ ID NO: 113650 - protein, 140 aa, Gossypium hirsutum
  Clone ID: uC-gsflnu33B093c02b1.pep
VFDRIYLLEWAWNLYENDQSLNLVDPTLAEFNKTEALRVLGVALLCTQASPSMRPLMSRVVAMLAGDIEVSTVTSKPRYLTDYDVKDITGTFMSEETQTFMASSSNENTMKSNNNAATVTDPSPSPVNVSGFSDILGEGR

SEQ ID NO: 113651 - protein, 157 aa, Gossypium hirsutum
  Clone ID: uC-gsflnu33B093c03b1.pep
FFVRFSRSKEGIAVFEMEYKHWMQVQNRQLGELRTALNAQISDIELRIVVENGMSHYFELFRMKSTVAKADVFYVMSGTWKTSAERFFSWIGGFRPSELLKVLLAQLDPLTDQQIFEVCNLKQSCQQAEDALSQGMEKLQETVSATLAAGQLGQGTY

SEQ ID NO: 113652 - protein, 181 aa, Gossypium hirsutum
  Clone ID: uC-gsflnu33B093c04b1.pep
GKHALPWELRYNVAVGIAEGLDYLHNELSRPVIHRDIKSSNILLSDGFEPKLSDFGLAIWGPTDSSFLIQADVVGTFGYLAPEYFMYGKLSDKIDVYAFGVVLLELLSGKRPISFENLKGQQSLVMWAKPIIESEIVKGILDPNLNGNINETHMHRMIRAATLCITRSGRLRPKMRQILRA

SEQ ID NO: 113653 - protein, 169 aa, Gossypium hirsutum
  unsure (1)..(169): unsure at all Xaa locations
  Clone ID: uC-gsflnu33B093c11b1.pep
MCFCGHFVKREFETLYIHRFSAETMPIMNLWKNCAYYWSFAFVIGYIVNRPDFVFPRMSYVITGLIVFLISELLNGLSHIQLRNLRRPGTRDRGIPTGLLFEYVSCPNYTCEITAWVGFSILTCSLASALFTLVGFGQMLAWAQKKHIRYXKEFPNYPKSRKVLVPFIY

SEQ ID NO: 113654 - protein, 104 aa, Gossypium hirsutum
  Clone ID: uC-gsflnu33B093e05b1.pep
RYFLFYCLNSREDACSSSASTRAILLMHILMLFTAAHDTASCAYLRIHLFLSLCDIYDIAKYIDHDMLRTVKLQVMGQKVNVVDAMMNKTSTQPGQPIEPFIIF

SEQ ID NO: 113655 - protein, 172 aa, Gossypium hirsutum
  unsure (1)..(172): unsure at all Xaa locations
  Clone ID: uC-gsflnu33B093e08b1.pep
FTRPVGTIYSKNELKKLLDIHAFHQESGVSRRDAIILAGVLDFAQKKLEQIMTPLDKVFMLDIECSLDVHTLTSVAENGHSRVPVYEGERNNIVSCLYMKDLALVNPEEGIPLRTFLSFYGRQIPKIRSDKTLDYVLTEFKSGKSHMAIVQRCDGANSTNDDNIXIATMEDV

SEQ ID NO: 113656 - protein, 119 aa, Gossypium hirsutum
  Clone ID: uC-gsflnu33B093e12b1.pep
WAFEKALKGEAPSQDARAPLDSLGSEGGPFFFPPPLVLTPPVQIFFSGSPLGGVSPLRWVLDPCPSNEVAPIFNKNNSGVFWGFSETRKNKKKKKKEKKKKQKKKKKKHKRKGGARDLG

SEQ ID NO: 113657 - protein, 91 aa, Gossypium hirsutum
  Clone ID: uC-gsflnu33B093f06b1.pep
TLPVSAIPWTWVRQNPLTQPNYRSKTVRTYALWRRAPNKRLLLIRTVMWVREWAWPPEFSTERPTDRTLGFAVYDRIQRKSAPLIISSLSV

SEQ ID NO: 113658 - protein, 97 aa, Gossypium hirsutum
  Clone ID: uC-gsflnu33B093f08b1.pep
YLAPLSCMPSPSPSQWPVNPSRSYHSPLQFSSSPPSQIRSISQIIYWLSETLHLLFTSTRLKISTLNLNPLPHMSVKVTSSSFKLPKLTPTLLCART

SEQ ID NO: 113659 - protein, 54 aa, Gossypium hirsutum
  Clone ID: uC-gsflnu33B093f09b1.pep
KQLKSQFTIGDILRPLHLTSHSKCQAPQGGTNDYNRMKTLLGVASVLAHASAHA

SEQ ID NO: 113660 - protein, 156 aa, Gossypium hirsutum
  unsure (1)..(156): unsure at all Xaa locations
  Clone ID: uC-gsflnu33B093h03b1.pep
GSSNLAEERRKRRIMEHDKLDYVLVPLGLLLLSLYHLWLLCTIIKHATRTVIGLNAHSRHQWVVSMMSDPLKNGVLAVHTIRNNIMASTLLATIAITLSSLISVFVSSSSDSGNTCSEIVFGNKTXATVFIXYFSILLCFLGAFLCNVQSIRYYAH

SEQ ID NO: 113661 - protein, 36 aa, Gossypium hirsutum
  Clone ID: uC-gsflnu33B094a06b1.pep
SNTSVRHLYWDITEEHKQHKRLLCPFPPYFIIGCDS

SEQ ID NO: 113662 - protein, 46 aa, Gossypium hirsutum
  Clone ID: uC-gsflnu33B094a09b1.pep
FRRLDIPPAAEAVNVDKMEVVDAAFPLLKGVDATTDADEACTGFND

SEQ ID NO: 113663 - protein, 39 aa, Gossypium hirsutum
  Clone ID: uC-gsflnu33B094a12b1.pep
LSLNLLILLINNSAYISSLHKRVSPLCNIPSFPCLGPIM

SEQ ID NO: 113664 - protein, 169 aa, Gossypium hirsutum
  unsure (1)..(169): unsure at all Xaa locations
  Clone ID: uC-gsflnu33B094b08b1.pep
SDAWVQVGDLAVLDISATTIEQDESNVQKVPAAESKGFQFDTEDDDKVLPGFLDSIIGIRQGETKSFPYVFPETWQQENLRGVEAQFTVECKELFYRDLPELNDSIADKLFPGCTDLNQVKELLLQKCQEMEQAVKDQXTDYAILDQLCRWLRSYSPILVEEQGSSFMS

SEQ ID NO: 113665 - protein, 71 aa, Gossypium hirsutum
  Clone ID: uC-gsflnu33B094c12b1.pep
MKFLTNFYKVWRAVMFQATHCWYSNTNFTIIHKQFRTIGITQAHSTICTPTRSSSRTRGRTRGRTRGRTRG

SEQ ID NO: 113666 - protein, 71 aa, Gossypium hirsutum
  Clone ID: uC-gsflnu33B094d03b1.pep
WKRSFILLLYVWVSSFFLSFFLFFFTLWFCNCGNFRYQYAPCCDVVPLPSPALVILSCTLLSPTLPKVINY

SEQ ID NO: 113667 - protein, 87 aa, Gossypium hirsutum
  Clone ID: uC-gsflnu33B094d07b1.pep
RARAGNPGGDPRFLTIKKDRGIKQRAWLKLGGTIPGQQLSMERRMKGLPKGELQASIGGEFLPERPGRNIDAGTEKRYQHLKEEARK

SEQ ID NO: 113668 - protein, 73 aa, Gossypium hirsutum
  Clone ID: uC-gsflnu33B094d12b1.pep
PFLQWLLAISLLTSQVMKTWRRNGRGACYTRAGTNVRGGVRGDCRWLRSCGAWSSLGFFFDLGYWRVLGFRIL

SEQ ID NO: 113669 - protein, 63 aa, Gossypium hirsutum
  Clone ID: uC-gsflnu33B094f02b1.pep
AHPSCVAPDTPPCAQRRHDQTSLACLDPCQPSAISFPALSFTNSLTLSVLVSVIPPFKISPCW

SEQ ID NO: 113670 - protein, 82 aa, Gossypium hirsutum
  Clone ID: uC-gsflnu33B094g03b1.pep
IGPGSHRSPWRFQIAFRMNKSRAQRRRLVWRGRLNSPRYSPLLTHLNHPQEQQNFSVPITLSLFFFSINFDLTVVFPHVETG

SEQ ID NO: 113671 - protein, 101 aa, Gossypium hirsutum
  Clone ID: uC-gsflnu33B094g09b1.pep
KSASNSHSKKLLNGSGLNLCSQPSNHSNGDGMDLTLVSNKRRKELFRHRNNDDCYLPAIPPSDRIPDMEIHPSEPHWLKDFSGIMKKVYGPVTVVKTIYED

SEQ ID NO: 113672 - protein, 129 aa, Gossypium hirsutum
  Clone ID: uC-gsflnu33B094g10b1.pep
CQSRARIEELETERRSSKKKLEQFLRKVSEERAAWRSREHEKIRAVVDDVKAELNREKKNRQRLEIVNSKLVNELAATKLSAKQYIQDYEKERKARELIEEVCDELAKEIGEDKAEVEELRRDSMKLRE

SEQ ID NO: 113673 - protein, 58 aa, Gossypium hirsutum
  Clone ID: uC-gsflnu33B094g11b1.pep
GFLEHTSAAIELTHGFHEWLSPYDRCSIPTKEYTRRSNNSMYSQMTEGKCIFIFPFIL

SEQ ID NO: 113674 - protein, 55 aa, Gossypium hirsutum
  Clone ID: uC-gsflnu33B094g12b1.pep
LLALIWELPTVGGPNGIDPLCVYSAGYEINQLQWSAAQPDWIAIAFSNKLQVLKV

SEQ ID NO: 113675 - protein, 68 aa, Gossypium hirsutum
  Clone ID: uC-gsflnu33B094h10b1.pep
IKKKKKKKKIGNLKKKRGRSLQETGWPLRRYEHCVLFHASPKVILFALHFNLIAWEEPPPTRLKPFRD

SEQ ID NO: 113676 - protein, 147 aa, Gossypium hirsutum
  Clone ID: uC-gsflnu33B094h12b1.pep
LSTRPPTRPIGSAFDSSDSRLSTDQVKEVNRRSASPLISLEYSSGWDPLDKGRSGNGFSQEVFESFMFNLEEVKRATQCFSETNLLGKSNFSAIYKGSLRDSSAVVVKCIAKTSCKSDESEFLQGLKILTSLKHENLVRLRGFWCQR

SEQ ID NO: 113677 - protein, 65 aa, Gossypium hirsutum
  Clone ID: uC-gsflnu33B095c02b1.pep
ISTLRMVETKNPLHLINLLKMTETRKFLLHQIKMRSRILKVSHLQTWLLFKIDNLVTISGIEPEI

SEQ ID NO: 113678 - protein, 59 aa, Gossypium hirsutum
  Clone ID: uC-gsflnu33B095d09b1.pep
FLWGKKRLVEFTIMSGDIARDSAEGSSRFSVSHHIQPQSPPMSRYESQKRRDWYTFGQY

SEQ ID NO: 113679 - protein, 125 aa, Gossypium hirsutum
  Clone ID: uC-gsflnu33B095d10b1.pep
FTLPPTRPPTRPAKLILLCLLAIFCFALTSHAATYVVGDTSGWDISTDIDSWATNKTFNVGDVLLFQYSSSHSVSEVNKESFETCNTTNSLTTFSNGNTTVTLSNAGKRYFVCGNKLHCLGGMKL

SEQ ID NO: 113680 - protein, 167 aa, Gossypium hirsutum
  Clone ID: uC-gsflnu33B095e09b1.pep
MLATPVIQMPTITAVKAVSLSNPNQHPFLRPHLVGFCLRKPKIPSTTRTALFCCKSQLQDFAPLTSAAYGTLLFSGGLFAFTKSGSKGSLFGGLTGAALMASAYYLMQSTETKAIGDALGFGSAFLFSCVFGIRLAATRKPIPAGPLLGLSICALVAFTSAYLQDRL

SEQ ID NO: 113681 - protein, 84 aa, Gossypium hirsutum
  Clone ID: uC-gsflnu33B095e11b1.pep
PTLPGKHRIQAELKRLDQEARFLEEELEHLEKMEKASTACKEMLSKVESTPDPLLPITNGPLNLTWDRWFEGPQESQGCKCWIL

SEQ ID NO: 113682 - protein, 50 aa, Gossypium hirsutum
  Clone ID: uC-gsflnu33B095f03b1.pep
FLTYVKKTVDKVSGAMKNHQIPKSRAKIDHYIESSQRKLTKLVMGYDDKD

SEQ ID NO: 113683 - protein, 37 aa, Gossypium hirsutum
  Clone ID: uC-gsflnu33B095g01b1.pep
EKFNIAGCFLASLAGLNIDSRNVPKRAGESGRTHPNK

SEQ ID NO: 113684 - protein, 39 aa, Gossypium hirsutum
  Clone ID: uC-gsflnu33B095g02b1.pep
KTVSKEVDVGNDELELLVLLLLQLSASDDEEWFGFVIRL

SEQ ID NO: 113685 - protein, 41 aa, Gossypium hirsutum
  Clone ID: uC-gsflnu33B095g08b1.pep
NYKNSRTKEVATPMLAIRHMYTTMLLSKMFRAMVFLLSYTT

SEQ ID NO: 113686 - protein, 54 aa, Gossypium hirsutum
  Clone ID: uC-gsflnu33B095h02b1.pep
LTSYQLDTEFNSTVDYFDIWKQSYLKTYADVDLELKHHPGIDAFRSGTTALTII

SEQ ID NO: 113687 - protein, 49 aa, Gossypium hirsutum
  Clone ID: uC-gsflnu33B095h11b1.pep
RNGCAHNPKPEPRKLRIEKKMFGLNSASFSSVCITQRQRIWGRTRGRKR

SEQ ID NO: 113688 - protein, 53 aa, Gossypium hirsutum
  Clone ID: uC-gsflnu33B097a06b1.pep
PIIPWDFLQRKLFGKGRHGRAMIGMVSPSVVVYMNGPLELSLPRDPEQAVHSS

SEQ ID NO: 113689 - protein, 90 aa, Gossypium hirsutum
  Clone ID: uC-gsflnu33B097a10b1.pep
VFFERKTHPCWCLLNQRRYSTSPSPPYLRIRSPNPHQSFNFSEANKDSEAPSTTDKSPFPLIDSFFHAIDKNDETEMKIKEEHDLKSPSN

SEQ ID NO: 113690 - protein, 36 aa, Gossypium hirsutum
  Clone ID: uC-gsflnu33B097b04b1.pep
TSDGCLPLYLVGVKSIDVSRKFRLYVSFILILLLVL

SEQ ID NO: 113691 - protein, 35 aa, Gossypium hirsutum
  unsure (1)..(35): unsure at all Xaa locations
  Clone ID: uC-gsflnu33B097c09b1.pep
SSPFHKSCFKCRHCXGTLTLGNYSSMEGALYCMPH

SEQ ID NO: 113692 - protein, 52 aa, Gossypium hirsutum
  Clone ID: uC-gsflnu33B097d05b1.pep
LESGGYSSLDDVITVPPSKRDKMETFFLGETLKYLVLLFGDCSAILLALFCF

SEQ ID NO: 113693 - protein, 33 aa, Gossypium hirsutum
  Clone ID: uC-gsflnu33B097d06b1.pep
MPRKWIWTYLPSFLRRSWRQKMADTIIGQLPFL

SEQ ID NO: 113694 - protein, 55 aa, Gossypium hirsutum
  Clone ID: uC-gsflnu33B097d09b1.pep
RPRVRPRVRPRVRSVLLIVLHCTNSIATWTGISYIKLRFHVEQWCHSYDIQVDPL

SEQ ID NO: 113695 - protein, 148 aa, Gossypium hirsutum
  Clone ID: uC-gsflnu33B097e02b1.pep
MLPLLLPLYEGGYLQLLHLQLQLLHPVFSPPATSPPVSTPPASPPPASSPSDFSPSVTPSPVFSPSVTSPPVTPPPATPPATSPPASLASPPATVPAFFPVQTPLTLAPASPTEAPAPTPGAASPGPAGTDTSRANQKWTAQKLMGRL

SEQ ID NO: 113696 - protein, 38 aa, Gossypium hirsutum
  Clone ID: uC-gsflnu33B097f02b1.pep
LWTMDMTEQFTDSPVIFGRLINLQSTVIMPIDSVGSYE

SEQ ID NO: 113697 - protein, 40 aa, Gossypium hirsutum
  Clone ID: uC-gsflnu33B097f06b1.pep
PSLHASHTGIWEHCLACPDKGLSSQQIGSWSSSATRRLTL

SEQ ID NO: 113698 - protein, 35 aa, Gossypium hirsutum
  Clone ID: uC-gsflnu33B097h07b1.pep
SLTRPKEFPEGAVLTTTAPYDTIRSKSLWTTSPLP

SEQ ID NO: 113699 - protein, 37 aa, Gossypium hirsutum
  Clone ID: uC-gsflnu33B098b03b1.pep
LNLNFQHSRGTETRIRPKLKMTNGCPLVSSNILSTMM

SEQ ID NO: 113700 - protein, 41 aa, Gossypium hirsutum
  Clone ID: uC-gsflnu33B098c11b1.pep
LVPFRDSSESVLISSSSGRTWKGTGTSKKPCCGAILRTRGV

SEQ ID NO: 113701 - protein, 30 aa, Gossypium hirsutum
  Clone ID: uC-gsflnu33B098d10b1.pep
SSSSSPIPTYCIFRGIGIAISIHFTFSVYS

SEQ ID NO: 113702 - protein, 67 aa, Gossypium hirsutum
  Clone ID: uC-gsflnu33B098e01b1.pep
NPDRRNGPAEDRRTWDNHRDYGLGPFDGAAKAANDYEDSINGPDTHEQITTTEYKDTWPASMYLNKG

SEQ ID NO: 113703 - protein, 35 aa, Gossypium hirsutum
  unsure (1)..(35): unsure at all Xaa locations
  Clone ID: uC-gsflnu33B098e08b1.pep
AXIFQNLLPFLVALFSLDTANNPKRSTRKGSTDQT

SEQ ID NO: 113704 - protein, 38 aa, Gossypium hirsutum
  Clone ID: uC-gsflnu33B098f12b1.pep
FLFQVSFISLHDWIEDTAWRIVQSESCRLTHVWPYAWQ

SEQ ID NO: 113705 - protein, 37 aa, Gossypium hirsutum
  Clone ID: uC-gsflnu33B098g12b1.pep
PPRVRFSFDCTKPNHLCFAILARYVKKLDYAQLNIEE

SEQ ID NO: 113706 - protein, 39 aa, Gossypium hirsutum
  unsure (1)..(39): unsure at all Xaa locations
  Clone ID: uC-gsflnu33B098h03b1.pep
REKPPKVYPAEDVXKALLNKRKPKPTQLXVSFSPGTVLI

SEQ ID NO: 113707 - protein, 59 aa, Gossypium hirsutum
  Clone ID: uC-gsflnu33B099a07b1.pep
DSAGLKGLKRSGFAAMGNVEGGDNGVYGPYLGHFFYGSSSVMGSLLCSKGSIWVIHFFL

SEQ ID NO: 113708 - protein, 34 aa, Gossypium hirsutum
  Clone ID: uC-gsflnu33B099c05b1.pep
EKFREALTTWVILRCTDLILLSCGDIENLEGLSD

SEQ ID NO: 113709 - protein, 48 aa, Gossypium hirsutum
  Clone ID: uC-gsflnu33B099d02b1.pep
INKFIYHNILLICILFIFYLQLSMACSSGSSFGSSTLVTISGFDDVFQ

SEQ ID NO: 113710 - protein, 37 aa, Gossypium hirsutum
  Clone ID: uC-gsflnu33B099d05b1.pep
RSRWTEESFGGSFSNLSSSVTTHSVQSFNVEPLVPSK

SEQ ID NO: 113711 - protein, 35 aa, Gossypium hirsutum
  Clone ID: uC-gsflnu33B099e03b1.pep
LLTLGEQSVELICSDLLMRFSFTVDSFNYLILLLS

SEQ ID NO: 113712 - protein, 51 aa, Gossypium hirsutum
  Clone ID: uC-gsflnu33B099e05b1.pep
RSGSSSCSDGSLKQQLEELQKQLGKKQRFEEAVIFINYFFKLHYPLASSIF

SEQ ID NO: 113713 - protein, 85 aa, Gossypium hirsutum
  Clone ID: uC-gsflnu33B099f05b1.pep
SRPALNEMWDILRFLFRLPSSVSSSLLSSSSSSLSSLSCSLPSSSPTSSFSSSSLILIFQHHPLLFLLPFLLNHYRPLLSNLLLF

SEQ ID NO: 113714 - protein, 44 aa, Gossypium hirsutum
  Clone ID: uC-gsflnu33B099h02b1.pep
YEHHFETDCPHRPYGELRARKSTHRLMRKIVRTHSSETLGCCRH

SEQ ID NO: 113715 - protein, 96 aa, Gossypium hirsutum
  Clone ID: uC-gsflnu33B100a03b1.pep
CKQKSSHHINKKTVSPSQLAPPMTSEIALIPRACFWVRPRRVVSSMYMPSPYNKVMLSMFSLLTAQNPDTTLEPKIGHMYTITKGVVRTRQFTARR

SEQ ID NO: 113716 - protein, 108 aa, Gossypium hirsutum
  Clone ID: uC-gsflnu33B100c05b1.pep
VRPRVRPRVRSYTRLPQVRASKKHGYCKLQKGLFMVWWYRGEIRFMTLSALNTLWLISNIKNVGMNTFYMLSCGGLNANRASFFDVNTTFNYGEHRMMRLIDRLVRGG

SEQ ID NO: 113717 - protein, 61 aa, Gossypium hirsutum
  unsure (1)..(61): unsure at all Xaa locations
  Clone ID: uC-gsflnu33B100c07b1.pep
FSSGFKKKPVMIIDDGMAGRGKTTTLHRLDCHTQAXNNTGYVMKIDPAEMTLTCAAEIDIR

SEQ ID NO: 113718 - protein, 144 aa, Gossypium hirsutum
  Clone ID: uC-gsflnu33B100c08b1.pep
RKDVVCHRINKPLTIMYDVLKRKQQQHMIGRLLKDAILALDEVQRHLFIVGKKIEELDRHLSKVYLAHGWLNKGTSTDDRVSMLTREKEGLSELLDSENQLYDMDNNTVEYKDFLGLEQSLKKTAWGKTPNYLQPIAIRIEKAR

SEQ ID NO: 113719 - protein, 56 aa, Gossypium hirsutum
  Clone ID: uC-gsflnu33B100d08b1.pep
IMNMIFILIKAKIWLKNMDTLFILTLFVSTISFAAGAAAFWAPSFHPRHSQGLVFF

SEQ ID NO: 113720 - protein, 125 aa, Gossypium hirsutum
  Clone ID: uC-gsflnu33B100e10b1.pep
MDASSTSSVNGFYTFLTRGIDDLERVYLSNNFMSIQFLQRVLSLLRSFHSQLLLLVQKLHLPVGDKWLDEYMDESSKLWEACHVIKSGISGIENYYSAGFNIISSFDNHRHLTHQLSRQVIRAIR

SEQ ID NO: 113721 - protein, 53 aa, Gossypium hirsutum
  Clone ID: uC-gsflnu33B100f08b1.pep
RWETVGGWVKLWAPKENLSYQKRRGINLGPQKGAPPAKSGHSLSTRGPALIVL

SEQ ID NO: 113722 - protein, 102 aa, Gossypium hirsutum
  Clone ID: uC-gsflnu33B100g02b1.pep
FSFLPSASVWRNARIMATFTSSTYTSVSPHSFLTHFRARVFPSCFCGINPGNKGNSVSLKLNLVRGLVFGEDKKRVSWWSCCCKKGWDNDGDLALEADIWSS

SEQ ID NO: 113723 - protein, 63 aa, Gossypium hirsutum
  unsure (1)..(63): unsure at all Xaa locations
  Clone ID: uC-gsflnu33B100g07b1.pep
VEIDWSTWEPWLVTEAGKLXTNERYILSFRDMKXATGHRTSRSTTFGYWKATGKERMVMDSRT

SEQ ID NO: 113724 - protein, 66 aa, Gossypium hirsutum
  Clone ID: uC-gsflnu33B100h04b1.pep
EAILGCLWGASDGGTPATIFTSVRRSDFVNERYRIHGNSGDQCCDLLCFAVGKRFFKLTNPMYYIA

SEQ ID NO: 113725 - protein, 90 aa, Gossypium hirsutum
  Clone ID: uC-gsflnu33B100h07b1.pep
PQGVVFKTGLDGIRLLDPSTSRTLRIYPIENITRCELTDTSTFAFWAYSLCRHLNLLRNRGGTKPVTLLTALYCIGADSGFQVRGIGFFS

SEQ ID NO: 113726 - protein, 72 aa, Gossypium hirsutum
  Clone ID: uC-gsflnu33B100h08b1.pep
RLRVRNSIFMLSCLGQSITPHGIKYASQRLDTFACVRYRKRCLHLGDNNVCPIEAYWPYTMLSFEAKGLTSN

SEQ ID NO: 113727 - protein, 146 aa, Gossypium hirsutum
  Clone ID: uC-gsflnu33B101b04b1.pep
MPIYGTLPFGGASPYIGISSKSVNPRPVPNLNLKLKMPFAEILEATNNFEAKLLIGEGGFGKVYKGILRNGLKAAVKRSESKHGQGLSEFQTEVMILSKIRHRHLVSLIGYCDEGSEMILVYEFMERGTLRDHLYKLGGNPERSSS

SEQ ID NO: 113728 - protein, 62 aa, Gossypium hirsutum
  Clone ID: uC-gsflnu33B101b05b1.pep
LLPKTVRQVEEEPIPEHVQKMFDEVKDTDHHHHHHHGHAHGHDHDHAAGFMDAYGLGHTWGS

SEQ ID NO: 113729 - protein, 48 aa, Gossypium hirsutum
  Clone ID: uC-gsflnu33B101b08b1.pep
HSLDSNFAVKPFSIYLMHMKIFPFIDVLYLYLFIYISSEYYLLSVVFS

SEQ ID NO: 113730 - protein, 171 aa, Gossypium hirsutum
  Clone ID: uC-gsflnu33B101b09b1.pep
IFTPRAKSTSSLPGTPIAHSNPESTHGGQKGGITGPPIHRSHSVPTLNKDGSITQLDSFGGVFRVIPTTPRVVKGTVVTTSNIVIKSDMDGNGDDGEDIPEEEAVCRICLIELGEGAETLKMECSCKGELALAHQECAIQWFSIKGNKMCDVCKQEVQNLPVTLLRIKTLS

SEQ ID NO: 113731 - protein, 117 aa, Gossypium hirsutum
  unsure (1)..(117): unsure at all Xaa locations
  Clone ID: uC-gsflnu33B101b10b1.pep
MSGSTTAACLARRAVHTEXIRIIYRRALKDTVNWTDHRHLFYXDAFDLWGTCETHQXVKDLGTMDIMIAAGQATYNKWRHPEPYIAPWAPGGCKCTHNPCPAFEIGILYEYGRGGND

SEQ ID NO: 113732 - protein, 71 aa, Gossypium hirsutum
  Clone ID: uC-gsflnu33B101c08b1.pep
FLSLKLPSLLREQLALEMRARAHGFKERTHEHRHCGEEVAGTGGDYATVTSDQTGLTGSSDSQLHKRIRVC

SEQ ID NO: 113733 - protein, 33 aa, Gossypium hirsutum
  Clone ID: uC-gsflnu33B101d02b1.pep
SVQILKAFDKEHEFPNPNSILMSTSSLYHASRK

SEQ ID NO: 113734 - protein, 49 aa, Gossypium hirsutum
  Clone ID: uC-gsflnu33B101d06b1.pep
LLVRGDRKNAEEWMLDYALQQVVAKLTPERKRRVGLLVEAFETVIPAIS

SEQ ID NO: 113735 - protein, 110 aa, Gossypium hirsutum
  Clone ID: uC-gsflnu33B101d11b1.pep
MAIDKKPNRLPQTAVIKQILKRCSSLGKKQQCYDDQQQQGGLPLDVPKGHFVVYVGQNRSRYIVPISFLTRPEFQKLLHQAEEEFGFEHDMGLTIPCEEVVFQSLTSMLR

SEQ ID NO: 113736 - protein, 134 aa, Gossypium hirsutum
  unsure (1)..(134): unsure at all Xaa locations
  Clone ID: uC-gsflnu33B101e09b1.pep
LKCPLTDAWADILVLFARDGINVMIGPYFXVKTETRDGTMSMAHAGAETIAXHNVTIIGILDRMAVMGIDTIGVDDLLGAHTVSISHWAKLKLGLNSEEVTAFRADHGTHMLHKCPDEIPDRKAVQCVRNDRGT

SEQ ID NO: 113737 - protein, 54 aa, Gossypium hirsutum
  Clone ID: uC-gsflnu33B101f01b1.pep
YAFFSWSYLIHYHPFGGSSPSHGGLHGFMHQLLYFLFLSFLTFIKCNVREVKCW

SEQ ID NO: 113738 - protein, 59 aa, Gossypium hirsutum
  Clone ID: uC-gsflnu33B101f05b1.pep
HSIIITELQVNETHSRATKNPDKLFLQHHISSASSQAQNGFFFISSIARSPHHSQTLNP

SEQ ID NO: 113739 - protein, 68 aa, Gossypium hirsutum
  Clone ID: uC-gsflnu33B101f12b1.pep
IGSCKSNQWCCTISQAFGISRLSTIRYRCRYMYSIWELPQQSRKVWQCTLCMQILALMVATSAFIMMY

SEQ ID NO: 113740 - protein, 60 aa, Gossypium hirsutum
  Clone ID: uC-gsflnu33B101g01b1.pep
SECRIYLFNHKFIFCSYDFHIHSYDTKGEERDSPKRGDGTPPSCVDLEHHASTSEPFACS

SEQ ID NO: 113741 - protein, 106 aa, Gossypium hirsutum
  Clone ID: uC-gsflnu33B101g03b1.pep
ATLPPPLRLDGDSHARASTRDLTQDLSSSALRNLIPNLDYSEGDKNSTGPFTTVNTCLHILAYIRATCKIHRQKHTHEKWIENHLYNNFEVDYGEFNKCIPVCVPI

SEQ ID NO: 113742 - protein, 110 aa, Gossypium hirsutum
  unsure (1)..(110): unsure at all Xaa locations
  Clone ID: uC-gsflnu33B107a10b1.pep
MVRAKFTDRKQTRGKAXRKQLATIDSRLCASTTGGVKKPYQYRSGTAGLLQLRKFXKSTVLSIKKLPFQRLATESLQYFMTDLXVMSQTVLVLQESRQTYFLTSLLRHLT

SEQ ID NO: 113743 - protein, 99 aa, Gossypium hirsutum
  Clone ID: uC-gsflnu33B107a12b1.pep
LTRGCDRKNRSSNDVQCLSYVSSDGNLCYHVACMKEACRDNWNKGYFRPGSETNEQSKFLALHNLAPKEVLSSVGQTSKVSLITFLKLVVNAILGEPFD

SEQ ID NO: 113744 - protein, 80 aa, Gossypium hirsutum
  Clone ID: uC-gsflnu33B107b09b1.pep
FLVFIPSFTHFLSFIFRLYNKITIYFKKKKKKKKKKKKKKKKKKKKKKKKKKKKKKKKKKKKKKGGPFKKTKFNYPGNET

SEQ ID NO: 113745 - protein, 48 aa, Gossypium hirsutum
  Clone ID: uC-gsflnu33B107d01b1.pep
KSHIMCMRTLPSEVMNAAQIKKYVNLTYISDDTYLDSCVLQRKKTLAS

SEQ ID NO: 113746 - protein, 114 aa, Gossypium hirsutum
  Clone ID: uC-gsflnu33B107d06b1.pep
FISLLLTTTLIIAVLAAESSGVHHLSWVPTTVNKSGGCKDSTAECMANVDEDEFDIGSEIKRRILQTTTYISYKALQRDTVPCSRRGASYYNCRPGAEANPYTRGCSTITRCRL

SEQ ID NO: 113747 - protein, 58 aa, Gossypium hirsutum
  Clone ID: uC-gsflnu33B107e09b1.pep
MHTPKVLSWFLPSMSYKLFAESSQYTRQLCMSIKCPDSKQLMEQQHQFSPFSTLASIS

SEQ ID NO: 113748 - protein, 32 aa, Gossypium hirsutum
  Clone ID: uC-gsflnu33B107f08b1.pep
GHALSCNLHHLIDLLMMMKQINIEVAHKEWHP

SEQ ID NO: 113749 - protein, 113 aa, Gossypium hirsutum
  Clone ID: uC-gsflnu33B107f09b1.pep
GLTNIIIIDSIFGPSPYTYKKPINKTHIKIQKSLKITKKSKNYKNIKSNYKLKNEPNPRAQTAPKGNSCCFPPPRASAHRARPPGSRVHAHERPLHVSTYLFFSFPIQIHNTN

SEQ ID NO: 113750 - protein, 102 aa, Gossypium hirsutum
  Clone ID: uC-gsflnu33B107f12b1.pep
RATLGGPPPPPRKRARKGGGPHAPSGGEPVGKGDRGGPLGNSPTGEKGKAPQGTKTGDPPGFPAQTVGKRRPRKRPRGPPKKNVHRPDRGREPGAPKRAPPQ

SEQ ID NO: 113751 - protein, 143 aa, Gossypium hirsutum
  Clone ID: uC-gsflnu33B107g03b1.pep
GSRFSSPCLRRFIFFLVSPNFISLAFFLHLFACETPGVPHFIFFAALPLFPCWLISKLALPVPLSQHFPILFFNLVPPSFRPFNPGGFGFSPQFSLFFCQFLCALFLVFFLSFFPLFLVFPLAFIGASFRFLYFFRPLPQNLF

SEQ ID NO: 113752 - protein, 69 aa, Gossypium hirsutum
  Clone ID: uC-gsflnu33B107g06b1.pep
LRVRPRVRPRVRLALHAVNEYYRLPWKPSVTTNLLGANTLIYLRPSFLDFFLSFVDEVWFNPHIFLKVS

SEQ ID NO: 113753 - protein, 155 aa, Gossypium hirsutum
  Clone ID: uC-gsflnu33B107h02b1.pep
MRDKMEKLVILPFSVGCVSDSSVAVAAQRHHHHHQPRRSKPPPAAADTNSNAKKKEDEDSLSSENMKYSLKLLPLPKPDISTGFNRLVTKSFKTLSQLFAYKDEIVESENEMEIGFPTDVKHVTHIGLDGSASTSPSNGSWDNRLSLMTCHFPSI

SEQ ID NO: 113754 - protein, 173 aa, Gossypium hirsutum
  Clone ID: uC-gsflnu33B107h03b1.pep
ATDEELVGFYLRRKVDNKPLTIELIKEIDIYKYDPSDLPKTGMVGENELYFFCRRGRKYRNSVRPNRVTESGFWKATGIDKPVFSVEGGEAIGLKKTLVYYRGSGGKGTKTDWMMHEFRLPNPTMTAHDAEVWTICRCFKRHRKIKQDWRQGAAKPALTGNWQCVQGYESGSV

SEQ ID NO: 113755 - protein, 96 aa, Gossypium hirsutum
  Clone ID: uC-gsflnu33B107h06b1.pep
HASAHASAHASAYAWSDAWAVRCVVSGAPKAALENPEDRVPIAPGSTDNRIKAGLCTTMCYGTKTCMGSLRYGSLNLGIRIAYEGCTRWVYAVTPA

SEQ ID NO: 113756 - protein, 91 aa, Gossypium hirsutum
  Clone ID: uC-gsflnu33B108a03b1.pep
TRPPTRPKKQREGFQISFPFRPKPPSSEIRRAQTTNDGKKNLKSPLTSSWVCMSLTWRGGAAHVVGRWLLVREVGVRRLRPLGRLAFFQKC

SEQ ID NO: 113757 - protein, 169 aa, Gossypium hirsutum
  Clone ID: uC-gsflnu33B108a04b1.pep
SKQSTTSSDSGRVPPLCSDYAPYPKLDPKHVASTPENWTNDSMGSQSQPNQGPATFSGSAATTMPAESNPYVSPAPVRSSFVKTDKMGAVKEVLGKLGKKAAEDTKKAKEIAGNMSQHLKTGPSFADAAVGRIAQGTKVLAEGGYDKIFRTTFETVPEEQFLETYACYL

SEQ ID NO: 113758 - protein, 143 aa, Gossypium hirsutum
  Clone ID: uC-gsflnu33B108b07b1.pep
SPRPKRKPVHPYPRKSVDLVKGKSPSSQPERSPSPNQFFREQDNKSPTSVLSDAVGSSALEQQKGCSSPTSCTTNLQSINTSPVEKETDYATSNLAAEEEKPSLSSVKIFGQSDAENILSMNLNTDLRTFVLVRACSTCYTFH

SEQ ID NO: 113759 - protein, 95 aa, Gossypium hirsutum
  Clone ID: uC-gsflnu33B108c06b1.pep
ILVFILGKNDDTVFKLKSNPNHAIRVLLMFHRVSRSLGFFIHTMRRLYVHMILSANHSQGALPPNIFKRSPLSLSLSLSLSLPPLYFNSPMKIYI

SEQ ID NO: 113760 - protein, 118 aa, Gossypium hirsutum
  unsure (1)..(118): unsure at all Xaa locations
  Clone ID: uC-gsflnu33B108d08b1.pep
KRGGTGRDPFAKQGEKLLERAPGAGPPAKKTGGERRMLNKATKGGTHRVSPKNTAQNVGQGIQKRRPKKRAPAAQTRGPKQGPPKTXRPIFFFFFFFFFFFFSFFFFYYSKYRNLCFK

SEQ ID NO: 113761 - protein, 89 aa, Gossypium hirsutum
  Clone ID: uC-gsflnu33B108d09b1.pep
GNLLTVIKKLYANTNDRSVLSLILADIKHKLGFFKQITFHHIRREANNAAHTLAKKGGQFFEGKFWIEDALEEVEWVAAIDRSNCSSLY

SEQ ID NO: 113762 - protein, 55 aa, Gossypium hirsutum
  Clone ID: uC-gsflnu33B108e04b1.pep
FLRLVSTNQLNFNLFLCYHRRSNPPSGELGLCGSDPNPVSTRIPNPKLTSTGNEA

SEQ ID NO: 113763 - protein, 79 aa, Gossypium hirsutum
  unsure (1)..(79): unsure at all Xaa locations
  Clone ID: uC-gsflnu33B108e05b1.pep
ITCYICKLLDVFYGHSVQRMLLQKRYLCYIFDNREKLFAWVVXXVFLIVINRLSKEVFERRPLRNLPQKLLKRKGKLLK

SEQ ID NO: 113764 - protein, 127 aa, Gossypium hirsutum
  unsure (1)..(127): unsure at all Xaa locations
  Clone ID: uC-gsflnu33B108e11b1.pep
SPLTTLSITVTESGPSSPSGSKSSGDSMIPSWVDGATRGPRTIGTTQTTAQVHPQLFTRTLLNTAVEKYGVEVVIGKLEQLRVEEGRVXLVVLEGGRGIESDSVVLSLGPRTGKFEMLATMFRVSGL

SEQ ID NO: 113765 - protein, 133 aa, Gossypium hirsutum
  unsure (1)..(133): unsure at all Xaa locations
  Clone ID: uC-gsflnu33B108f03b1.pep
FAYAAIWLDDDGFVAEGPSMNVAFITKEKEMLMPQXDKILNGCTAKRVLTLAEGLVREGKLRRIRVDNVSVDEGKSADEMMLIGSGVLVRPVIQRDEQVIGDGKEGPITKTLLNFILEDMKSGPSSVRVPVPY

SEQ ID NO: 113766 - protein, 72 aa, Gossypium hirsutum
  unsure (1)..(72): unsure at all Xaa locations
  Clone ID: uC-gsflnu33B108g01b1.pep
MLPRQPGLKGSCYALLRDCQTTEMVLTLAEILTQSAXRSGKALRKERKPLKRCDSGITNTMLTMPMAMDTFS

SEQ ID NO: 113767 - protein, 123 aa, Gossypium hirsutum
  unsure (1)..(123): unsure at all Xaa locations
  Clone ID: uC-gsflnu33B108g04b1.pep
TAKNMLQRPARRCEGTAMGAIVLDLRPGLGVGPFTLGMPICEAFAQIEQQPKIYDVVHVKYYDEEPLKLDIVISFPDHGFIFRFDPWLKRLRLXEIFDINVLNALCTSLXGGPSTLLRSCLAF

SEQ ID NO: 113768 - protein, 70 aa, Gossypium hirsutum
  Clone ID: uC-gsflnu33B108g09b1.pep
LSSVHLRSLQGHLVRSCSACDCVSAGCRSRVSHVSVHLPVSFRSFSQIGCCKSSRNRNLDACFFCLHSEE

SEQ ID NO: 113769 - protein, 76 aa, Gossypium hirsutum
  Clone ID: uC-gsflnu33B108h01b1.pep
PRQWCSFWQTHSRESATRAVTVLRNDTLPSMRCVTTMTKTMFSMEMGKDIFSYHLPMGCCAYPGHPPLPGKSAAQQ

SEQ ID NO: 113770 - protein, 170 aa, Gossypium hirsutum
  unsure (1)..(170): unsure at all Xaa locations
  Clone ID: uC-gsflnu33B109a02b1.pep
MILKRYLSWKNILPNCIKPQVPSSGQKVHPSKRSPSQRLSLSDISHFGSPLSLNDLSNSLISLHVFTLKELELVTHKFSKSNFLGEGGFGPVYKGFIDDNLRPGLKAQSVAVKVLDLDGTQGHKEWLAEVILLGQLKHXHLVNLIGYCYEDDHRLLVYEYMERGSLENQL

SEQ ID NO: 113771 - protein, 61 aa, Gossypium hirsutum
  Clone ID: uC-gsflnu33B109a08b1.pep
KATQISCYFLKKNKKKFIKYKDFQHCLASRPHIRIAGVFGALIGFQSRKENEQTKKINLEQ

SEQ ID NO: 113772 - protein, 94 aa, Gossypium hirsutum
  Clone ID: uC-gsflnu33B109a10b1.pep
EADAQSRCTERARSVTAFDSVTAFLAHALTQTVSWEPNFSSWPTATDATLMAALGICHPATSCISCIKVLLSSADAQVMPMSSSVYSPAAQSEA

SEQ ID NO: 113773 - protein, 130 aa, Gossypium hirsutum
  Clone ID: uC-gsflnu33B109b02b1.pep
MGEIRLFWLLFVWVLGIERGVSGLACNWGLQSTHPLPSNIVVKLLKDNGFDKVKLFEADPGALKALGKSGIQVMVGIPNDMLASLAGSAGNAEAWVQQNVSNYVSKYGTDIRVVAIGNEPFLILTRYVHQ

SEQ ID NO: 113774 - protein, 85 aa, Gossypium hirsutum
  Clone ID: uC-gsflnu33B109b12b1.pep
NQLPKRNLVTCCSVQHHWASQRVHSTLFEIRFGLERMHHPPLSCGMGSNVDPILACFLTFSSLLKDHMFLRGDLSCSRPGFYQGV

SEQ ID NO: 113775 - protein, 120 aa, Gossypium hirsutum
  unsure (1)..(120): unsure at all Xaa locations
  Clone ID: uC-gsflnu33B109c07b1.pep
FAIRLHDRLRLEHKYILMSSGATVSGKDGDDACVCQDAGGTYDSTRNWIELEFVPLXIDTSYELADQSHSATARNADVVALRDSDEENETWICPSSYVYRLCTTKMMVVDWVVRLYLLEF

SEQ ID NO: 113776 - protein, 102 aa, Gossypium hirsutum
  Clone ID: uC-gsflnu33B109d08b1.pep
VEGSGSMADHPPPKLTEPLPCPWRDYSNTKLCYYNSYNLYQTSYICTACRHYWTQGGTMHHVSVGGGTRKAFKRSACSSGSCMTWQVLVTRARRMKLEPYCC

SEQ ID NO: 113777 - protein, 91 aa, Gossypium hirsutum
  Clone ID: uC-gsflnu33B109e02b1.pep
GKLSIYGETFADENFTLKHSGPGLLSMANSGPNTNGCQFFITCNACEWLDSKHVVFGRVLEGLKIVRMIENVPVVNGKPKIEVKITECGEL

SEQ ID NO: 113778 - protein, 50 aa, Gossypium hirsutum
  Clone ID: uC-gsflnu33B109e11b1.pep
KSYKLACPSLETLNRQTLRPFFFFFIFFFFFFFFFFFFFFFFFFFFFFFF

SEQ ID NO: 113779 - protein, 133 aa, Gossypium hirsutum
  unsure (1)..(133): unsure at all Xaa locations
  Clone ID: uC-gsflnu33B109e12b1.pep
MGSFKLQKRISGSVLKCGTGKDWLDPNEVSESFMANSRQKIWKLDKDGLIIRKPTTIHSRPRALRMKEAKREGPYSGYGQRNGTXREARMPTKILSMKRKHVLRHLLPKYRQTKNIDTYMYHDMYLRLKGNVF

SEQ ID NO: 113780 - protein, 74 aa, Gossypium hirsutum
  Clone ID: uC-gsflnu33B109f02b1.pep
YASGSVKSDLQLLEDIADRALKQESIFVVVSKRSTLDKCPLPVGIRLFVSAAHSESDLLKACESLKRVAAAMLR

SEQ ID NO: 113781 - protein, 45 aa, Gossypium hirsutum
  Clone ID: uC-gsflnu33B109f07b1.pep
LAKSIPDGTLFCDARALNRKALQEVYDGYSHSWTRQGHVSQRALQ

SEQ ID NO: 113782 - protein, 60 aa, Gossypium hirsutum
  Clone ID: uC-gsflnu33B109f10b1.pep
MAALHAMRHGLEVCSESAWLPHLYKSGGLDSGSDEGFDAREQGHLKRPVTVRGITYEQTR

SEQ ID NO: 113783 - protein, 119 aa, Gossypium hirsutum
  Clone ID: uC-gsflnu33B109g04b1.pep
GNARKGSSCSKALLWLTRSMDFMVALFQKLVKDPGQNMEQAVEESYNITLKPRHGWISTAAFKVALKLVPDNKTFISLLMAKDQNCDNLKEEMQTLITLLVPFLEQIHFVMRLYRLDRL

SEQ ID NO: 113784 - protein, 71 aa, Gossypium hirsutum
  Clone ID: uC-gsflnu33B109g08b1.pep
GMNILDGRLNRAATTGGGRGANRTFKPMFQANSIAKTGWTKEDPKMEPPTTYKVGIRRQRSDLRRRSLRLG

SEQ ID NO: 113785 - protein, 159 aa, Gossypium hirsutum
  unsure (1)..(159): unsure at all Xaa locations
  Clone ID: uC-gsflnu33B109h05b1.pep
MSPRIWFYSILLTLQYGAQPLISKRFTRREVIVTSSVLICEIAKVACAIILMAKDGSIKRLAKEWTLMGSLTASGLPAAIYALQNSLLQISYRNLDSLTFSMLNQTKIFFTALFTYIILRQRQSIQQTGALFLLIMAAVLLSIGEGSSXASSTGDPEQI

SEQ ID NO: 113786 - protein, 55 aa, Gossypium hirsutum
  Clone ID: uC-gsflnu33B109h08b1.pep
QGQIIASHKYKSSSLNTHCIDQISFLHFSLSKSSASPFSLSLSVTPFSSVLLGVA

SEQ ID NO: 113787 - protein, 70 aa, Gossypium hirsutum
  Clone ID: uC-gsflnu33B110a05b1.pep
LRVRTPGLPRGQYNGYQIQIPSPANVAAKDHEQRTIGAVPFIKDQVVGKLLRTIWQNVHISRNGTPSGMM

SEQ ID NO: 113788 - protein, 166 aa, Gossypium hirsutum
  Clone ID: uC-gsflnu33B110a09b1.pep
FVGREGKYVTSRNLRDRLYCELERNLAMRVEDGETADTFIVSGRGTLHITILIENMRREGYEFMVGPPKVINKKVADKLLEPYEIATVEVPEEHMGAVVELLGRRRGQMIDMQGVGAEGTTLLKYKIPTRGLLGLRNAILTASRGTAILNTIFDSYGPWAGDIVTR

SEQ ID NO: 113789 - protein, 89 aa, Gossypium hirsutum
  Clone ID: uC-gsflnu33B110b07b1.pep
FHSSGFYKHTVKPGSYAWKYHRPPPRRSNVIDMDSIFDVFEHLIAEDEMNIFDAEDLENDDISMEMALFLMQLDYDSSDSSSDEENFHY

SEQ ID NO: 113790 - protein, 59 aa, Gossypium hirsutum
  Clone ID: uC-gsflnu33B110c01b1.pep
LTRGRTLGERRALKWVCSIPRSQAGASDFEHSLAQTSTEEYMHRLPVAGNSSSGIKSWA

SEQ ID NO: 113791 - protein, 90 aa, Gossypium hirsutum
  Clone ID: uC-gsflnu33B110c05b1.pep
VRPLGRAHTLAGTHASVTSSDEKASRGAFGSQPESDANQGRGGMLRESQSDIFAGDLATRLDLSGTAVEYGAKKGKDHRFVVNPGGSSCG

SEQ ID NO: 113792 - protein, 106 aa, Gossypium hirsutum
  Clone ID: uC-gsflnu33B110c08b1.pep
VVSLRLSPVLVADLLVWDQWWSLGHLPPGFVVPLTTVVSFSAPIFNCLRPAAGQSHPIPISIINIENKLSRQLPELYLHLFEGLINYAKKKSRDPVFSKSIISEDI

SEQ ID NO: 113793 - protein, 49 aa, Gossypium hirsutum
  Clone ID: uC-gsflnu33B110d02b1.pep
VPVACRTLCFHYLRLSSRLETDAWISRAVYSAHAPMASLSGAHSWCVRQ

SEQ ID NO: 113794 - protein, 70 aa, Gossypium hirsutum
  Clone ID: uC-gsflnu33B110d06b1.pep
PLSWFRSTAILACDTSSLFFPFDVPYGSVCFSYHTVLSDGPKSSCLLLVLLPDAFGSALDLNIVALITPP

SEQ ID NO: 113795 - protein, 62 aa, Gossypium hirsutum
  Clone ID: uC-gsflnu33B110d07b1.pep
SSAVNHLPSRSEQVPNHLVLNVTQCSNSHLLVLAHCQLSWALDEYIVALLLRPPPLAFSHAW

SEQ ID NO: 113796 - protein, 55 aa, Gossypium hirsutum
  Clone ID: uC-gsflnu33B110e01b1.pep
DTVRHRNSILPHSGVHYHCFNHDGTHTCLALGKHYVHRSRLLGTVIQRSTSEVSV

SEQ ID NO: 113797 - protein, 83 aa, Gossypium hirsutum
  Clone ID: uC-gsflnu33B110e02b1.pep
WFIRLSLFIDCKIQPYPLMAFFPIRAYITVFFSLTGPKHGWCFVSIICMCRVFLGRRSRGHHLRFLYGSLYHHLVFIIAGAPD

SEQ ID NO: 113798 - protein, 54 aa, Gossypium hirsutum
  Clone ID: uC-gsflnu33B110e05b1.pep
LWLFSKKKKKKKKKKKKKKGGTSKKNQSKKTGAARLEDPSLRRYINDWPFYSTP

SEQ ID NO: 113799 - protein, 166 aa, Gossypium hirsutum
  Clone ID: uC-gsflnu33B110e10b1.pep
QFESLQAMMPWYSVGHPSMIQPAVMRYIKEVWGFNKKPLLVVLDPQGRVVNPNAMPMMFIWGSMAFPFTKLREEALWKEETWRIELLAYSIDPSIINWLTDRKFICLYGGEDMNWIRKFTTTAKAVAKTANIELEMLYVGKSNPRERVRRNMTNIELENLSHTLSD

SEQ ID NO: 113800 - protein, 73 aa, Gossypium hirsutum
  Clone ID: uC-gsflnu33B110f02b1.pep
FFASGHDEGHGGDKEDLVGTSDVQLSLRGPCTRCRMTGALTWTATRKGGVMLKTMAMKVSVERKTITGTSGDP

SEQ ID NO: 113801 - protein, 41 aa, Gossypium hirsutum
  Clone ID: uC-gsflnu33B110f05b1.pep
QLLKHQVLNETQRSSAPELMLTAYQLRCPLYVYLVAHLSHP

SEQ ID NO: 113802 - protein, 64 aa, Gossypium hirsutum
  Clone ID: uC-gsflnu33B110f06b1.pep
CHLCERHTLRGAARLLWYRSNQIMEHQVLGARHCSSRPELMLAPCKLNCALYVNLVAHILPQWN

SEQ ID NO: 113803 - protein, 54 aa, Gossypium hirsutum
  Clone ID: uC-gsflnu33B110f07b1.pep
CHACENAEVGGHDRTDTRNNSKGQLSWTAMSTGYRSSGALSSTEDRVVDNKLGT

SEQ ID NO: 113804 - protein, 63 aa, Gossypium hirsutum
  Clone ID: uC-gsflnu33B110g06b1.pep
ISVAANLIPYGSKLVINHPVLNIAHCSRLHMLLLVRSQLRWALGVNLVSLLTPPCTSAFPHAW

SEQ ID NO: 113805 - protein, 65 aa, Gossypium hirsutum
  Clone ID: uC-gsflnu33B110g09b1.pep
RKVLVSHCSLVPAIGASSSVKLYIGAYQGLNYSPSGLSKALSSLVCYGTFPVSSLAPGLAVPSFR

SEQ ID NO: 113806 - protein, 150 aa, Gossypium hirsutum
  Clone ID: uC-gsflnu33B110g11b1.pep
MGRPDTDPEQIQAEYELRPQEYDPTHEPTPNVADEYPPPPPYENRNQQGQQQPQFPPQQPPQYPPPAQQQPPQYPLPAQQQPPQYPPPSQQPNQAYPPPQRPAPYPPQQNMQYNPAYPNGTNQQPAAAAYPPQPVQYPQKVQRRIRCTQM

SEQ ID NO: 113807 - protein, 40 aa, Gossypium hirsutum
  Clone ID: uC-gsflnu33B110h05b1.pep
LSRENTTRNGTRICGTHVMCTGDSSQPIESLWFHGDWGEA

SEQ ID NO: 113808 - protein, 40 aa, Gossypium hirsutum
  Clone ID: uC-gsflnu33B110h07b1.pep
AHVQQNGSKLMLNHQVLGESHRTRPHHTVLTHIHLSWTLY

SEQ ID NO: 113809 - protein, 33 aa, Gossypium hirsutum
  Clone ID: uC-gsflnu33B110h12b1.pep
VISCGITLSFNFIQQIELSLYSSTFRSMMHMFF

SEQ ID NO: 113810 - protein, 150 aa, Gossypium hirsutum
  Clone ID: uC-gsflnu33B111a03b1.pep
MPSFPQPGSVTICEINRDLVTADALSDSKAKDTYGKLLGMVFNPVPFQSLEDPTQPPPASNAAVSQPKGFGMITSSLKHIFLPNDIDLLPEVALQGVSWHQHKHILAFISGSNQVTVRDYDDSGKEPCILTSESQRDVKVLEWRPNGGKS

SEQ ID NO: 113811 - protein, 110 aa, Gossypium hirsutum
  Clone ID: uC-gsflnu33B111b04b1.pep
RVFISIRQLKKTRGIDITDAKSWSNGKREKTVFVGARHIIGGLISSMGLAEPRFQGVYSGGAGQNAHVTFSGGCDASGTMGGACGYGNLYCQGDGVNAGALSTALLNNGL

SEQ ID NO: 113812 - protein, 150 aa, Gossypium hirsutum
  unsure (1)..(150): unsure at all Xaa locations
  Clone ID: uC-gsflnu33B111c06b1.pep
MQKSEPKFIQVLLLLVQHGANGLNLLEAQHVILVEPLLNPAVEAQAISRVHRIGQDKRTLFHRFIVKNTVEESIYKLNRSRNSSGFVGNTKNQDQPVLTLKDVESLFATAPSRAQKTDEDKAESENLRYLPPSMAAAIAAERRLXENLTA

SEQ ID NO: 113813 - protein, 76 aa, Gossypium hirsutum
  Clone ID: uC-gsflnu33B111d11b1.pep
MNDYIMGFHWAIHIKAHITLFINSKLLLAILHNKSAALLLFLSTLFIYVETITFTGQDFIFCAQMVANLKSIVYAF

SEQ ID NO: 113814 - protein, 36 aa, Gossypium hirsutum
  Clone ID: uC-gsflnu33B111f07b1.pep
SRVRLNLAIFKAFLFYTIYIWMTPGNRDIFIGSFEL

SEQ ID NO: 113815 - protein, 170 aa, Gossypium hirsutum
  Clone ID: uC-gsflnu33B111f10b1.pep
CIKSTEKCANHEKQIEASFVEASMPPRIPSASLQKGILKRNPRGCRGICTCLNCSSFRLHAERSFEFSRNQMQDAEEVGLDLIKELSYLRNMLEKSAFVAKDQTNICIDQVKEAWKKASDAEELAKTRLSEMNYHLNIHCRIPCEQRPSVRFADYVEEHVIHPIADSSNK

SEQ ID NO: 113816 - protein, 115 aa, Gossypium hirsutum
  Clone ID: uC-gsflnu33B111g03b1.pep
MRPMMQQLLSKEILHEPMKEIGERYPQWLEEHKANLSKEEYERYSRQYELIKELNGVYENDPNNFTKIVDLMQKMQECGQPPNDIVQELAPEFDLSNLGQLSPEILNSQQNCCIM

SEQ ID NO: 113817 - protein, 85 aa, Gossypium hirsutum
  Clone ID: uC-gsflnu33B111h05b1.pep
SSRPEFVNSIVGCLKKKKKKNQKKKKGATKLCGISVLPGSAAGGSRLVVPSRSVCLARPTWPRCAASRPSFAARVPPLWPCAPRR

SEQ ID NO: 113818 - protein, 35 aa, Gossypium hirsutum
  Clone ID: uC-gsflnu33B112a05b1.pep
NSFTYRKDQLYTVACFYGFRSLPINIPPHIPPRSV

SEQ ID NO: 113819 - protein, 157 aa, Gossypium hirsutum
  Clone ID: uC-gsflnu33B112b01b1.pep
MKSPELIELGLGLEASNKPFIWILRGNNDASNQVTKWIEEDGFEERIKGRGFVVVGWAPQVLILSHPAIGGFLTHCGWNSTIEGISAGVPLLTLPLFADQFTNERLVVQILKTGVSVGADEPTAWGEEKSGFKLTKEHVKNAIDQLMNEGNKGIDRR

SEQ ID NO: 113820 - protein, 141 aa, Gossypium hirsutum
  Clone ID: uC-gsflnu33B112b10b1.pep
PRVRFFGFLLKVEAPSAYVCADSKIYDATEWYICQGMRCPPNTHKPSFHVNTSVTSKHATGKGSSSGQRGGTMPTPPNLEETMTEEEFLAWLQNAVQGGMFDNFNGSSTSAENPSTKAESSSKSSSSGSGSKRKKKGKKQW

SEQ ID NO: 113821 - protein, 127 aa, Gossypium hirsutum
  Clone ID: uC-gsflnu33B112c02b1.pep
VDAVMALSNLSTYTDNLTVIIETDPVPSVVTLLKSSKRSSKTAEKCCSVIESMVGFDEGRTALAAEDGGILAVGEVLENGTRQAREHAVGALLTICESDRCKYRELILKEGVIPGLLELKGQGTPKS

SEQ ID NO: 113822 - protein, 120 aa, Gossypium hirsutum
  Clone ID: uC-gsflnu33B112c03b1.pep
PRGETPPHPRPKGPLKGGSPSPLRGPHVWKNNPGRALLFYPHRGKRGGPQKHLSGGTPGFSPPTRVKTPPKQLNLGAPKKKTYFANPGTKKWDPQKGPPPYRDKMHAFRYVQRDIPFFLF

SEQ ID NO: 113823 - protein, 57 aa, Gossypium hirsutum
  Clone ID: uC-gsflnu33B112c07b1.pep
YKMVSDYILATNNSCTKTITKTNTKDMNARIIIVVSSSTDFLCITSDELSTQIKRLR

SEQ ID NO: 113824 - protein, 109 aa, Gossypium hirsutum
  unsure (1)..(109): unsure at all Xaa locations
  Clone ID: uC-gsflnu33B112c08b1.pep
ITRTVITDDETKTKLCKVLSVQFGQKGITYVSTYHGHTMRYQDPXNKAHDTINLNLGSNKNDGXMRKDVANVDMGTGRGNRGHVAVVENRAKHTGRYETIHDQDAGEHE

SEQ ID NO: 113825 - protein, 79 aa, Gossypium hirsutum
  Clone ID: uC-gsflnu33B112d10b1.pep
SEIDIFVSLTDKTERRSFYILIRSKSWLWQSTVGSSSTQGHQGPFSLFLFWLWQSTVGSSSTQGHQGPFSLFLFFWTIK

SEQ ID NO: 113826 - protein, 123 aa, Gossypium hirsutum
  unsure (1)..(123): unsure at all Xaa locations
  Clone ID: uC-gsflnu33B112e05b1.pep
PIRPLQLIARNCRNLVSVKISDCEILDLVGFFHAAAVLEESNGGPFYDQPDGYAAVTFPSRLCRLGLTYMGKNEMPIVFPFAPXFKELDLLYALLDTEDHCLIIQTCPTAEVLKTLNVIGDRG

SEQ ID NO: 113827 - protein, 155 aa, Gossypium hirsutum
  unsure (1)..(155): unsure at all Xaa locations
  Clone ID: uC-gsflnu33B112e07b1.pep
LRVRPGVRTTGSSSNVCVQTEPDVEGSNHDGSAIAVTSVAKSLVPTRRRLTLDPXHERYFPYEPGKQXSSAFTIKNTSWSYAAIKFQTTEPESCNMRPPXAILAPDESIIATVYTFEEPSEDNEERMDLKSRGKCKXMSLNEKAAMDYIPELLDE

SEQ ID NO: 113828 - protein, 130 aa, Gossypium hirsutum
  unsure (1)..(130): unsure at all Xaa locations
  Clone ID: uC-gsflnu33B112e10b1.pep
FEARSLEEKLGGATMXTSVLLQGGRYDAWSXKEYNADNMMDTLRIFLKMGSEQLCGGQMRDIKGVRMTAQWANTASXHNMKKMETKLPVFTGDNDDGHGCNEKNRNRDPQQNXDRAYCKCRGTSNIMRAF

SEQ ID NO: 113829 - protein, 85 aa, Gossypium hirsutum
  Clone ID: uC-gsflnu33B112f09b1.pep
HSPHLRVAYFVDCSLGELCLNLSLVLPFLSMRDVTYIGIYFTISFCQFHSVEKDVHDLIFLCLVLSNKMYHMWPWIFCVCIISIG

SEQ ID NO: 113830 - protein, 71 aa, Gossypium hirsutum
  Clone ID: uC-gsflnu33B112g02b1.pep
PAIERMTMDTYAGGGSWTTILSGPPNSNASTTSNQDPTYQYTTPSPSQQELQLDQHDQPLPSHFDLLHDFL

SEQ ID NO: 113831 - protein, 49 aa, Gossypium hirsutum
  Clone ID: uC-gsflnu33B112g07b1.pep
IVLLTRRENFLKYQLQMNKVDLIVQSVWNMCLEYNEMLMLENKILFLHG

SEQ ID NO: 113832 - protein, 123 aa, Gossypium hirsutum
  unsure (1)..(123): unsure at all Xaa locations
  Clone ID: uC-gsflnu33B112g09b1.pep
RLCPAALLLLFFFGNCFVASRLCSVVIFFPATTLLLQLLYFTSLPYCYFFSSNCFAADLLWFLYSLIKILSSRLCPAAINFFRQLLYCFTSLPYCYFFPATASQLICFGFSAWLLQFILHXLS

SEQ ID NO: 113833 - protein, 36 aa, Gossypium hirsutum
  Clone ID: uC-gsflnu33B112h04b1.pep
TCKINSGEFKPVYIIQLGVYQAFKRKQKNAFRRKCS

SEQ ID NO: 113834 - protein, 161 aa, Gossypium hirsutum
  Clone ID: uC-gsflnu33B113c06b1.pep
PTRPGICVEEEEVEECGIGGGGGQIFGGGRGGGGSDSEDNEWGFCDSKNGNDSTDLYYQKMIEANPGNTLLLGNYAKFLKEVRGDFVKAEEYCGRAILINPNDGNILSMYAELIWQTHKDDRRAEAYFDQAIKSAPDDCFVLASYARFLWDAEEEEEEEEV

SEQ ID NO: 113835 - protein, 75 aa, Gossypium hirsutum
  Clone ID: uC-gsflnu33B113c09b1.pep
SSIAMVLCVPTTIADFTYDVLLCNHNPLIVIIYEHVVFPQPLTNFTCNTLSCTHNHSRFHLRCIVVCSQLSVVKL

SEQ ID NO: 113836 - protein, 70 aa, Gossypium hirsutum
  Clone ID: uC-gsflnu33B113c10b1.pep
GGPKKKIFSCKDGEEKLGPLKRAPLFFFFFFFFFFFFFFFFFFFFFFFFFFFFFFFFFFFFFFIETVYVP

SEQ ID NO: 113837 - protein, 38 aa, Gossypium hirsutum
  Clone ID: uC-gsflnu33B113d01b1.pep
LCAQQKSVNFIHVVFEYLNDDSSYHILEYMSNAAIRYL

SEQ ID NO: 113838 - protein, 80 aa, Gossypium hirsutum
  Clone ID: uC-gsflnu33B113f01b1.pep
FFSYKPLYFPCSIHLNIFPYLFKYMIRHIQNGQPPTNFTSMTYKLGIGSDVNVHRCSCSEVLVVDDVAVLPFSVPLSTGT

SEQ ID NO: 113839 - protein, 87 aa, Gossypium hirsutum
  unsure (1)..(87): unsure at all Xaa locations
  Clone ID: uC-gsflnu33B113f09b1.pep
NKYGPVHPPCGXFXYYKILVDASRXNHICVINSQPVICKIACLNDXNFDYAVKIIHLANVGEFTSQVFNDYCMSIGIKVEHPITHVH

SEQ ID NO: 113840 - protein, 99 aa, Gossypium hirsutum
  Clone ID: uC-gsflnu33B113f12b1.pep
PSTAPSLMPPPPPPPQLLSHFNFDISLHFRSKPISKSSPLSIFPPSSSFLALQSPLPKQRNPVLFLTRATSQNDNDQPPQGTPSPPPLPQGAKLLPFLI

SEQ ID NO: 113841 - protein, 110 aa, Gossypium hirsutum
  Clone ID: uC-gsflnu33B113g12b1.pep
AHYNPKNLKPNEISPKPNQPQIARIITECQKPYGFWRRTPHPRPYLPPPFVVSHPPIPSAFVARHQTPESPRQCRRRSPPSGHRNRTRRVAFGVPLHSPEPTKVGPSVGP

SEQ ID NO: 113842 - protein, 135 aa, Gossypium hirsutum
  Clone ID: uC-gsflnu33B113h04b1.pep
MKLNQADSTADDLEPLFDYRRVQPLNIVCLDDDCSDTSPVPSPKRRKFANPDVAEVDLDKDVEVIKVVNVEEEDWLAPPPVVSTKAYSKIGEDSTIKELRRRKQELLSFAQSAKIMLQEVEESAKQEPSGSSKPS

SEQ ID NO: 113843 - protein, 93 aa, Gossypium hirsutum
  unsure (1)..(93): unsure at all Xaa locations
  Clone ID: uC-gsflnu33B113h09b1.pep
FANSKNKNIRLIRKFYFFIKFFIKKIYMDILLYIINISRTNTQLFPESTKKMIKKXINKTTKNATHFISTIKTSLSSLSNTSIRNKNELYSYL

SEQ ID NO: 113844 - protein, 72 aa, Gossypium hirsutum
  Clone ID: uC-gsflnu33B113h10b1.pep
NNGHGNQFRANKKKIIALQGREYKNETFKTAHPQSIYTYKPPPPLLPSLPFIFLPPFFLSYFSFSGRVGGRV

SEQ ID NO: 113845 - protein, 160 aa, Gossypium hirsutum
  Clone ID: uC-gsflnu33B113h12b1.pep
PRVRQLIATYNPQSRGSYVNGYRIGVNRADLARALNLSVKKDKDKDSILDIEESKESVGFLEEFVSNWVLLHEDTWMMPAEVLNWTKMIKEGHFEKIDWAGLIWFMVEKELTSAPKLGNCYYASHMQCLIKYQKEELLLEKPEKDAYEAKEEEEEHNVPE

SEQ ID NO: 113846 - protein, 53 aa, Gossypium hirsutum
  Clone ID: uC-gsflnu33B114a02b1.pep
RKKGLYLHMRATRIHHLLSGVEGLEYSKANILLPRVLISILLFREEYWALLLY

SEQ ID NO: 113847 - protein, 162 aa, Gossypium hirsutum
  Clone ID: uC-gsflnu33B114b03b1.pep
VTVTGWPWQGGPNEPDATVENAGTFINYLIRRVSNDSGPPSRPNIPINTYIYELFNEDKRPGPVSEKNWGVLYTNGTAVFPLSLSGSSQIMGNATTVFCVAKDDASEGKLQDGLNWACGQGQANCSVIQSGQPCYLPNNTKNHASYAYNDYYQRMHTVGATC

SEQ ID NO: 113848 - protein, 169 aa, Gossypium hirsutum
  Clone ID: uC-gsflnu33B114b12b1.pep
STHLPKRTDNEIKNYWNTHLKKRLAKLGIDPITHKPKSDALLSIDSQSKSAANLSHMAQWESARLEAEARLVRESKLRSHSHSFQHRLTRPPTAAFASSAGELVNKTAWNSTAGWSKSSEVNNGVVNNGFGDLESPKSTLTSSDGVGLSSMGMPDFVGTASASSQIKQE

SEQ ID NO: 113849 - protein, 67 aa, Gossypium hirsutum
  Clone ID: uC-gsflnu33B114c07b1.pep
RLRVRPLVRRVLPSVPSRVLRRRTQLVLRPPNLLPRRIERSLERELYQVSLQLWTIILNLDFRIYLL

SEQ ID NO: 113850 - protein, 61 aa, Gossypium hirsutum
  Clone ID: uC-gsflnu33B114d01b1.pep
HLMHYASNNNKDCLTFALHSNAFPWMHKMSYGVWTFYFRIYVHRFCLVLDVHYVNCVLHFL

SEQ ID NO: 113851 - protein, 61 aa, Gossypium hirsutum
  Clone ID: uC-gsflnu33B114e11b1.pep
PYKRLIQWPVCESKSGTFRMAALFVQLFTFASSFDLAQQLIYTVHIIQSGSKDEAGRPQTS

SEQ ID NO: 113852 - protein, 64 aa, Gossypium hirsutum
  Clone ID: uC-gsflnu33B114f04b1.pep
INKTKKLILVIQLLIQVMFPIKPYARILLIKLPILRETMDMMLFVLYKLWNFFFNLNHRMFFRI

SEQ ID NO: 113853 - protein, 69 aa, Gossypium hirsutum
  Clone ID: uC-gsflnu33B114f05b1.pep
FIKQIILQFRNIVVVKSVKVTQKWRIKSQNNLQSTNSITITRTFKTILFQRIQSFYTSSNPRFADHPKG

SEQ ID NO: 113854 - protein, 92 aa, Gossypium hirsutum
  Clone ID: uC-gsflnu33B114f08b1.pep
RRLFYFLSWFQLFFYQLQWQVGSFFNVSFFFCAAALIWCKSHARFVHEIFVSGYLMINRFHHFKTTKNKSCLGFIIHKQFDDKILQVDDPSS

SEQ ID NO: 113855 - protein, 144 aa, Gossypium hirsutum
  Clone ID: uC-gsflnu33B114g08b1.pep
LLDAISKLEVYLNRNLERAMKENDRVYLMRVPSPSSLPPLPAFSMVKSMQMNDVLDASKEKMFASLVPDSSAKALSRYTEMVDDVIRTQAEKLQQGSELTRVRLKEMDLPDSILALEGNFSLPEDLKNEVEKVHASGGPAGLEA

SEQ ID NO: 113856 - protein, 57 aa, Gossypium hirsutum
  Clone ID: uC-gsflnu33B114g10b1.pep
PIMYLYLVKLQVESILRFKAVDLLRSHQISFCSRMQQFKFSNIAEKICIVFQLLSHQ

SEQ ID NO: 113857 - protein, 114 aa, Gossypium hirsutum
  Clone ID: uC-gsflnu33B114g11b1.pep
TGHQCWHRYHNDWDHRHSQMPMLGVNWTNSAEPKVHHPHVDKRGPSLRPRLKLIGITLFALSHIRLCTLECRRPWICSTSRCARQSVCPRHWQPLQPCVTSIVHHPPLSRRPAQ

SEQ ID NO: 113858 - protein, 48 aa, Gossypium hirsutum
  unsure (1)..(48): unsure at all Xaa locations
  Clone ID: uC-gsflnu33B114h10b1.pep
WQRRWGWGRCXRLRLILAPTHTSGRSAGSRGVFVWSFCLYPGPYGIPF

SEQ ID NO: 113859 - protein, 49 aa, Gossypium hirsutum
  Clone ID: uC-gsflnu33B115a10b1.pep
NGNHCSGLVVSFKLNICLRIFFPSLFQKLKMITLGNVYVQRDGPTFTNE

SEQ ID NO: 113860 - protein, 99 aa, Gossypium hirsutum
  Clone ID: uC-gsflnu33B115c04b1.pep
EHRIVSVHKGNACKDKRLRHLNGPFEGRRHPKPDRLWVKRHIIVFSIACITQSIKIFPHDQMPPSIPLIEKFRGRSESTAATSHNTRNNPKGEMIPRSE

SEQ ID NO: 113861 - protein, 91 aa, Gossypium hirsutum
  Clone ID: uC-gsflnu33B115c05b1.pep
SLMLILFYKKGLNCFYSDENAFYPYLFSTLAASNPHTFSLLIDVFSYIPLSTFTALTSATFTFPTCVWTFFVVNASTQGLPYGKQHLHWRV

SEQ ID NO: 113862 - protein, 150 aa, Gossypium hirsutum
  Clone ID: uC-gsflnu33B115c11b1.pep
PTRPEQGPYPFEQAFESFINGVSHFGPFFDHVLQYWDQSLKSPNKILFLKYEDLKKDPKGEVKKLASFLGKPFNNEKEVEDVIWRCSLERLKNLEVNKNGIDPWVGMQNSAFFRSGIVGDWKNIMSKELSERLDQITRQKFKDSGLHLEI

SEQ ID NO: 113863 - protein, 79 aa, Gossypium hirsutum
  Clone ID: uC-gsflnu33B115d01b1.pep
HVPMEHLTDHLRHSITQTKTKTLFNSLWSNDVSGYGDSLWHKRIHYLLAAPYTDEYSSDDRSNERATWTVTDTRFEDGH

SEQ ID NO: 113864 - protein, 143 aa, Gossypium hirsutum
  unsure (1)..(143): unsure at all Xaa locations
  Clone ID: uC-gsflnu33B115d07b1.pep
STRPFNAGGGGTGSGLGSLLLERLSGDYGTKSKLGFTAYPSPQASTSGXEPYNSALSTHSLLEHTDGAVLTDNEAVYDMLRRSFYIARPIYTNFNHLGCKVIXSVTTSTRQAGPLNVHETEFQTILFPYSTIHQMLFSYAPVF

SEQ ID NO: 113865 - protein, 79 aa, Gossypium hirsutum
  Clone ID: uC-gsflnu33B115d10b1.pep
NLPKLTNIYHFFCPTKTYQIYHIASHILYQNHDISTTIPSHITWLNIYITKHNSITSSLYMPYFNIYIFKVPKLGLIVW

SEQ ID NO: 113866 - protein, 103 aa, Gossypium hirsutum
  Clone ID: uC-gsflnu33B115e01b1.pep
FIGGITIVNDAFNANPDSVKAGINTLKNIHCDGQRVAILGDMYELCTHEIEYHEEVLNYCLDACIDVIAIAGQRFHLSADNMNLMKKTNAVRADETENLITNI

SEQ ID NO: 113867 - protein, 136 aa, Gossypium hirsutum
  Clone ID: uC-gsflnu33B115g07b1.pep
MVLGDLASSIGNVVSDITGINKTTKTVTGSVVLVKKNFLDFTSLTSTEVDGLFELLGNGVTLQLVSAENTDPANENGGKLGKLEALEYWNLTYTPTLAGSDSLYKVSFEWDEELGIPGAIILRNNHAARVFLKTIT

SEQ ID NO: 113868 - protein, 90 aa, Gossypium hirsutum
  Clone ID: uC-gsflnu33B115h12b1.pep
WIRTGFFDHFEIDSISCNAFMTFPKKLSNYNHLAKKGFFSFWSLFVESSHVFLEAKIWACTVCLLMMHQNYLKLKCCKERLQTKALLRKF

SEQ ID NO: 113869 - protein, 86 aa, Gossypium hirsutum
  Clone ID: uC-gsflnu33B126a11b1.pep
KKEEMRLISLLIFLSLTTCDRGGFLGDRSTLLCGPQLALFFGEHIADLRAQFDPPDGGENPWFTPEEMGRGPPSLSPLENEGTARP

SEQ ID NO: 113870 - protein, 41 aa, Gossypium hirsutum
  Clone ID: uC-gsflnu33B126b11b1.pep
SADKRFGNAKELLISSIFINDHLYPLCDFLLDSDIIHNNSK

SEQ ID NO: 113871 - protein, 137 aa, Gossypium hirsutum
  Clone ID: uC-gsflnu33B126c09b1.pep
MGAEWKWFFSLLSLTLVCVLLLVLYSISPFSSPRPFPSLVQLGLPYPPPFGYYIFGGKGDKDRIFRLLLAVYHPRNRYVLHLGADATDGERYSLVVALKSAPAIRSFSNADVIGNPDRLLYMGSSYIASTLHAAAIL

SEQ ID NO: 113872 - protein, 93 aa, Gossypium hirsutum
  Clone ID: uC-gsflnu33B126d12b1.pep
MKQKIVGFISFLSLAFLLLCCSSTSARLLMQINHETGEKEVKANEMIIQADAKDDFSNLIGAEKCYEKDEECLERRMIADAGLDYIYSQSNKP

SEQ ID NO: 113873 - protein, 127 aa, Gossypium hirsutum
  Clone ID: uC-gsflnu33B126e10b1.pep
HLKTLHLCLNFQRPRGWATVFKRFPRGLQHKRQSNSFLQFKFMGHKLYINTFPVDVGMRPVTGLRLYLEGKRSNRLAIYMQHLFSLQTSFRLVDEPTDALPDEESYDKRHMDKVRWKNFSRVCAAKN

SEQ ID NO: 113874 - protein, 104 aa, Gossypium hirsutum
  Clone ID: uC-gsflnu33B126f02b1.pep
QTGLKGIKNRRKKRAERPSSQKGQRQGSPRPNRGKTRTIKGDLRAPKRKQGPPNKTHETLDQRDAPPQPQKENPEIYKSAFPFFIFLFFLFFFFFFFFFFRTQG

SEQ ID NO: 113875 - protein, 183 aa, Gossypium hirsutum
  unsure (1)..(183): unsure at all Xaa locations
  Clone ID: uC-gsflnu33B126f12b1.pep
PRVRPRVRGLLPIQKLIFTDPVQALTQLKEKLSSSFALRVGSAALADALQISSDHARLILDTLSSVLHSESDPLVTARPEDVDSIGADLRDLVLFLYIQSYKRLLPRSHKDSAAVADVWPSTSAFDGYLSALSPLQLVRSNTRRFMPSQADEEAHQLSYLQKHLANILSLLXEHVEGEGKESM

SEQ ID NO: 113876 - protein, 74 aa, Gossypium hirsutum
  Clone ID: uC-gsflnu33B126g03b1.pep
LLPISSLLCFPSHSCFWILLSSMNDFDIWAVGNLSSNFLPFYGLFGYLVYAFQAQMFVLFSISLRCHFFCYFEC

SEQ ID NO: 113877 - protein, 147 aa, Gossypium hirsutum
  Clone ID: uC-gsflnu33B126g07b1.pep
NSFEVTFKKPNSSTQPNMFIFAVAAFVCIGAIVAQPPPTQIPQLNNRPLFEALEKRADALVARARAVAQEHRVLGGSNRLLDSLDRQATLVEALALDLKAKLYVPDDKRPQPDVHHIHVIEEELLHLENRVSEEIEILEHIRNGGDQ

SEQ ID NO: 113878 - protein, 49 aa, Gossypium hirsutum
  Clone ID: uC-gsflnu33B126h01b1.pep
IGASLRSASGSITCVMRHAFPCCVELYGPSMALSSNLIYFKHSSVASAV

SEQ ID NO: 113879 - protein, 103 aa, Gossypium hirsutum
  Clone ID: uC-gsflnu33B126h05b1.pep
QHLLLAVVIYLPRLGRNVARITPSLIHLCIPKNSRKESSCSATWSLNSNSIGTLKLHCHRHRRVHSIVHCKRLWSSQCQYNCFHIRIPHLAGTFHAHYNCWGK

SEQ ID NO: 113880 - protein, 67 aa, Gossypium hirsutum
  Clone ID: uC-gsflnu33B126h07b1.pep
TESEYVVIYESSVNTTRLVFSQITQTSLFRAHTSQMTQPITTPSLSLRVWATQHSIHCLKHMRTCKR

SEQ ID NO: 113881 - protein, 97 aa, Gossypium hirsutum
  unsure (1)..(97): unsure at all Xaa locations
  Clone ID: uC-gsflnu33B127a11b1.pep
FYGSEHTVSPGVLVLTATVVPLLAMHACYLFXLPENYHMTCYLYHILYWPYILYLFYFYTSLIGGYILLXMGDESTEWQHHITFFVVLHTYRRLGLP

SEQ ID NO: 113882 - protein, 76 aa, Gossypium hirsutum
  Clone ID: uC-gsflnu33B127b01b1.pep
MCCDGDCRPLGFLLGLPFAFLSLIISIVGVVVWIVGLLLTLICPCCLCVTVLVEMALELVKAPIHVMEWFTEQIPC

SEQ ID NO: 113883 - protein, 67 aa, Gossypium hirsutum
  Clone ID: uC-gsflnu33B127b06b1.pep
FLASGRGLFGSDAALLNNAETKAYVLQASRHGSTFAKDFAVSMEKMGKVEVLTGNQGEIRKHCAMVN

SEQ ID NO: 113884 - protein, 109 aa, Gossypium hirsutum
  Clone ID: uC-gsflnu33B127b09b1.pep
PDTIGPITKYQDSKYQNPKILEPTDPKPGSSKLSPNQWSTLEASRVSLVPQQWIQTPRVHHYQAREPFPHGCLRQLFQAGCTWWPIFLLLHCNQSRMENRGPKWRRRGK

SEQ ID NO: 113885 - protein, 136 aa, Gossypium hirsutum
  Clone ID: uC-gsflnu33B127b12b1.pep
SLYSLAKIIEKWDFSNGGNGNVGRENQNGGVLVGEDTQHDFNNLLKVLGEDEELYDCIDGIIGYQIMVLELLAQSSFETQSINNSNHLHESMECQLLEIHPPIGCDLLSNTEYASQAALWGIEVSANGTFFYLCVG

SEQ ID NO: 113886 - protein, 60 aa, Gossypium hirsutum
  Clone ID: uC-gsflnu33B127c05b1.pep
NSYLTFPQNPNRIRIPPFLSLLFLIRFSYCSFSNPNRICSPSCYLISLFSFPFLSIIFSS

SEQ ID NO: 113887 - protein, 70 aa, Gossypium hirsutum
  Clone ID: uC-gsflnu33B127d02b1.pep
RRIQIAYRIYIYLEARNLNIQPPLNPSQIHINIHCLHHTCQRTKPCHGFYLRDEICHQKSITGRVGGREG

SEQ ID NO: 113888 - protein, 164 aa, Gossypium hirsutum
  Clone ID: uC-gsflnu33B127d12b1.pep
MDRRSAFAVALICIVVAGVGGQSPSAAPTKAPPAATTPSTAPATAPVSKSKSPAPTAAPTTLPPAAAPSESAAVPAPSKFAPASSPPAAAPVSTPPAPVTVSPPLAKSPPAAAPTTPPESSASPPAPVAAPTTAEVPAPAPSKSKSKKKSKKHGAPAPSPDMLG

SEQ ID NO: 113889 - protein, 92 aa, Gossypium hirsutum
  Clone ID: uC-gsflnu33B127g09b1.pep
KGMVLQWSQLGKSRVFPRSSLVKHGQAISIWGGKKKINASAVRGDQFWSYKVAPPLGRDPRGYVLPHIIDFDLHSHCFFLLLLFFVSFFLLL

SEQ ID NO: 113890 - protein, 81 aa, Gossypium hirsutum
  Clone ID: uC-gsflnu33B127g11b1.pep
VQSYGSNVPPQQQYAYASSGPTQQSYPPYGSAPPSDGYSQPSTEGGQAYPQHGSQPVPGYSQPTAYAQASSAAGYGQYPPS

SEQ ID NO: 113891 - protein, 97 aa, Gossypium hirsutum
  Clone ID: uC-gsflnu33B127h08b1.pep
IKKRKMKSVNGKFLKKLKSIKPVGYLKPDRVLQVFAIDGFIDSYTKTPNPNEQAKLFTKEFEEQEIIKENQPEIIDVEELMKEFEFDEDEDEDGEEE

SEQ ID NO: 113892 - protein, 47 aa, Gossypium hirsutum
  Clone ID: uC-gsflnu33B128a06b1.pep
FYRVRKKKSPQKQKRKVWCYFVINTVITYHFFNFFLCMNHCLLLYNA

SEQ ID NO: 113893 - protein, 45 aa, Gossypium hirsutum
  Clone ID: uC-gsflnu33B128b01b1.pep
TNEEYVVKEFHFQFNRLSTSNLKTLQFPTPETLRNLNSGCSSLFQ

SEQ ID NO: 113894 - protein, 133 aa, Gossypium hirsutum
  Clone ID: uC-gsflnu33B128b07b1.pep
PTRPVTREQGSFEWFRGVMNEVAEYDRDRMIELHNYCTSVYEEGDARSALITMLQSLQHAKSGVDIVSGTQVKTHFARPNWHKVFKHVAVNHTDKRVGVFYCGAPGLTGELRRLAQEFSRKTSTKFDFHKENF

SEQ ID NO: 113895 - protein, 107 aa, Gossypium hirsutum
  Clone ID: uC-gsflnu33B128c04b1.pep
MMMMSSASSSAATVAVDKATSDLLMGPDWTMNIDICDSVNSNHWPAKDVVKAVKRRLQHKSSKVQLLALTLLETMVKNCGDYVHFQIAERNILWEMVKIVKKESGYA

SEQ ID NO: 113896 - protein, 77 aa, Gossypium hirsutum
  Clone ID: uC-gsflnu33B128c10b1.pep
ERLMLHHAWLNGNQACSSIPLSQLYYSTEGRRHWVDNHTRGYHSSGYRAHTRLSPYIRTHGILTLTSHIVYVHRNQI

SEQ ID NO: 113897 - protein, 80 aa, Gossypium hirsutum
  Clone ID: uC-gsflnu33B128d10b1.pep
RTRVQKGREITFSVFSIAFYCLCIHTICADISFFLLRNPLQRLKFWLYSRKGKEKFTKNKKKQWFSFFVPFAAVAGLPLC

SEQ ID NO: 113898 - protein, 126 aa, Gossypium hirsutum
  Clone ID: uC-gsflnu33B128d11b1.pep
PTRPGSLKDLLPKEEAENSVGIAKLLEIAIGVAQGIEYLHNGCESRILHLDIKPQNVLLDQSLNPKISDFGLAKVYSRDHSYVTMTSARGTIGFIAPEIFMRNLGNPSHKSDVYSYGKLLLEMVGG

SEQ ID NO: 113899 - protein, 102 aa, Gossypium hirsutum
  Clone ID: uC-gsflnu33B128e03b1.pep
KEKKKKKKKKKKKKKKKDNRYRGEEVCVPLVSPLSRVSRACVLRSCNVSRFFLVSPLCNPLAVLFHCPGWETPVFPQLICFAGLPPLPFGPFAQAAWPVGPS

SEQ ID NO: 113900 - protein, 52 aa, Gossypium hirsutum
  Clone ID: uC-gsflnu33B128e07b1.pep
GMTLLCSIGTLCCAYKLVRLQPDGLRLFRTYYEWDIHYLYMFSVVFQKKNYQ

SEQ ID NO: 113901 - protein, 76 aa, Gossypium hirsutum
  Clone ID: uC-gsflnu33B128e10b1.pep
CVIEAVAIGDGTRMERLIDAEQIITIWSYKIHEILDKATVSNYEGRTLRVLIEAAREATQVNNMMAHNDETDARPI

SEQ ID NO: 113902 - protein, 79 aa, Gossypium hirsutum
  Clone ID: uC-gsflnu33B128f04b1.pep
RYRIANQTQECQLNHVLVTSMPSKDIKKTLNTNKLVLKKFGLLASIIEPFYCYTKQTQGKTHSKSFKIKIRNIKIMYVF

SEQ ID NO: 113903 - protein, 157 aa, Gossypium hirsutum
  unsure (1)..(157): unsure at all Xaa locations
  Clone ID: uC-gsflnu33B128f10b1.pep
SFVPLIDPLNWQQPPTHQQDQVFTKDNHHHIHNPQLPPPPPAGSSVGINRPGSMAERARLANMQKPEKALKCPRCESTDTKFCYFNNYSLSQPRYFCKTCKRYWTRGGALRNVPIGGGCRTNKRSKGSKPTKSPSIGQMNXNTATVASIIAPFTLSW

SEQ ID NO: 113904 - protein, 61 aa, Gossypium hirsutum
  Clone ID: uC-gsflnu33B128h02b1.pep
RLLHSPQKKTISFHKECQYLSKKLILVIMLLQNRFNCHRYWLYTSRSWDYWTKNSTKKIVL

SEQ ID NO: 113905 - protein, 39 aa, Gossypium hirsutum
  Clone ID: uC-gsflnu33B129a03b1.pep
STKRRDHCYKKSLVGFLQALLLCQLIDKGFVMFSRIFTS

SEQ ID NO: 113906 - protein, 112 aa, Gossypium hirsutum
  unsure (1)..(112): unsure at all Xaa locations
  Clone ID: uC-gsflnu33B129a12b1.pep
AFLTISYITGSWVLSLKRLSNIAIIDVRDDERQPDGHTAEPLHYASGPFTDKNVNLIQHVKGKETLVPHWALSQVRGPNXAPRVSVIIKRSFRKHTGIKNIWLLSXGFNGWE

SEQ ID NO: 113907 - protein, 104 aa, Gossypium hirsutum
  unsure (1)..(104): unsure at all Xaa locations
  Clone ID: uC-gsflnu33B129b05b1.pep
FIEGERVESDETQNKVMAVWVASGSLLTSETXAPLDATLPLEIKGEVGEFIKANFTFSQELHYTFLKMNPKTTXEGKPYTLDMRKTLDDPTVIKNFNKRLYAEC

SEQ ID NO: 113908 - protein, 65 aa, Gossypium hirsutum
  Clone ID: uC-gsflnu33B129b08b1.pep
IVELMNTVLCGGVACTSSVILPLLLWISHALHPFIYSRPVLFWCLVTTTRSPSKQVSHVAHWRLK

SEQ ID NO: 113909 - protein, 44 aa, Gossypium hirsutum
  unsure (1)..(44): unsure at all Xaa locations
  Clone ID: uC-gsflnu33B129c04b1.pep
SEEEKAITDKGLHXHTSTMSTPRDTDPDVLPLYPVTTPRGSSSD

SEQ ID NO: 113910 - protein, 78 aa, Gossypium hirsutum
  Clone ID: uC-gsflnu33B129c07b1.pep
SCSPSNNLIFVAPLCNVTGTAYTLMAYTSEDFDYKSLFLCLHHCLLSEIVISRESSSGFSFLDGFHPVSGVKSSSPSS

SEQ ID NO: 113911 - protein, 171 aa, Gossypium hirsutum
  unsure (1)..(171): unsure at all Xaa locations
  Clone ID: uC-gsflnu33B129d05b1.pep
FISSNSSLSYFSDSGCSWKGVHCDTKKESVLGLKASGLGLSGLIPDTTIGKLIQLQSLDLSNNKITALPSDLWSLGSLKSLNLSSNQISGFLPNNIGNFGQLEVIDLSGNNFTGEIPTAISSLASLRVLKLAGNGSEWRISTGILSCRSLXSLDLSXKSLNGSLPDGFGAA

SEQ ID NO: 113912 - protein, 120 aa, Gossypium hirsutum
  Clone ID: uC-gsflnu33B129e06b1.pep
DLNFARAQLNLKPTLHQSQHLAYQNKTATKYIWPNWPKINPSPQHVFSSNGSRSPRACRTFSICSNDPITPRRNHPRSAIPCVHHARSSCEEETCCRTGAGEDLWSVEVVAAAPRVRGRK

SEQ ID NO: 113913 - protein, 145 aa, Gossypium hirsutum
  Clone ID: uC-gsflnu33B129e11b1.pep
MESSVCPFCHLSVPSSELQWHANSHFEDEDKEANDMELGNQIQIASSSGSTDVVSISSLIGLQTRSNFYHVKDGLISLLRNCLELEARHNSSVTILSGHVDHFQSLPSVDVGWGCGWRNIQMLSSHLLAHRKEARKVPVVSQVLS

SEQ ID NO: 113914 - protein, 65 aa, Gossypium hirsutum
  Clone ID: uC-gsflnu33B129f04b1.pep
KSKKRGGRCVGSLFDSGWRARDSYSIVLGWWSLVSMFWPRFYWEKPGCSGVFPLLFCFAFYPFCV

SEQ ID NO: 113915 - protein, 78 aa, Gossypium hirsutum
  Clone ID: uC-gsflnu33B129g05b1.pep
AWAGLGFIVWVIWILCCWATHVVNGLKIWTFYLVIRVLFCCFFLLVGLGQNWLLHSVFLLFILFNHTIDLFVWRGQHY

SEQ ID NO: 113916 - protein, 96 aa, Gossypium hirsutum
  Clone ID: uC-gsflnu33B129h12b1.pep
FLMHVSPRIVIPFTQVFESLSVSVNIISFIAHLFSHTSGPCYAWNILRDGCSASHSPKWYPPRPVYALSDVSRLSSVFANEANRKGRMDVEALTHR

SEQ ID NO: 113917 - protein, 56 aa, Gossypium hirsutum
  Clone ID: uC-gsflnu33B130a08b1.pep
VVVCVQVVCSPMIFACLFRPLLEWLYRKLSALHLFLCYKVIHASLLSVVPALPRRP

SEQ ID NO: 113918 - protein, 115 aa, Gossypium hirsutum
  Clone ID: uC-gsflnu33B130a11b1.pep
MATTLIASSQTSFHHPLSVSDSSFSSPSSSSSSVSMFTLTKPRILSLPSYKSSFFNPIGSYFKCIEMEPRKIRSSSLAVRMSWDGPLASVKLNIQGQNLELTDTVKQHVEEKVGK

SEQ ID NO: 113919 - protein, 99 aa, Gossypium hirsutum
  Clone ID: uC-gsflnu33B130b03b1.pep
NLQLNSLQRKLICLQLPSPTLPFGGVQILVYPSWLIRPIYVECHATPFDPFGRVYYNRSSLSKLLSYRGIWGVSFIIFFFSSFFIIFLYSSCYVFSVEH

SEQ ID NO: 113920 - protein, 149 aa, Gossypium hirsutum
  Clone ID: uC-gsflnu33B130b04b1.pep
CVIGHILLMKGVGLVLVWIQQNNLIRSNVLIRSNKYLVSEFRNSMARIFSILLFITCVYYLGRIPAPILTKKLKGISEPEEVGESEEERNIEIETISEGGGANQKQGTEENTSFSLFSEEEVDPSKETEKLRATGKKKKKNKGRIPLSF

SEQ ID NO: 113921 - protein, 123 aa, Gossypium hirsutum
  Clone ID: uC-gsflnu33B130b08b1.pep
MMSNERHASSNPTSPQENDAMFLDILHEAPLFGHRKPRSIVGGVFYCFILAGYAILAAAAPWIFQPLGHLVLPLLCSCDVVLLIVTGIFQQYHVYQVQKIRLQGYYSFSQKLKHIVRLPFAIT

SEQ ID NO: 113922 - protein, 81 aa, Gossypium hirsutum
  Clone ID: uC-gsflnu33B130b09b1.pep
FTSRQFILTTGGLAQSYIAFTGEGYMKRVQDTAKSWKEIHLMELAVYADTITQDYHIWRKPPVNSQQVSSTSYTFRNPFSE

SEQ ID NO: 113923 - protein, 138 aa, Gossypium hirsutum
  Clone ID: uC-gsflnu33B130d05b1.pep
HCVRPRGRRGWGGMPGKEDSTLDSISEQQQSKTNKKHASIISSASSKASTDKANKGEEKGNLKRSVLTVPFKANSKTANLGGGLRGTANIASMANNWRRLSMKGREPQYLECLGRPVKLDLQCFPCSEPPTWLVPRKM

SEQ ID NO: 113924 - protein, 136 aa, Gossypium hirsutum
  Clone ID: uC-gsflnu33B130d08b1.pep
LKPLIFPQNQELFFILVSPEFEAPTKKMRAALPAEIGMPHHVWNCSQAGALVASVLEGDVVGLGKALSSDKIVEPKRAPLIPGMEAVKKAAIKAGAFGCTISGAGPTAVAVIDNEEEGKKIVQKMVEAFLEEGHLR

SEQ ID NO: 113925 - protein, 108 aa, Gossypium hirsutum
  unsure (1)..(108): unsure at all Xaa locations
  Clone ID: uC-gsflnu33B130d09b1.pep
VVREGLSLFCTGAFLACGQYCIDCVLGPSYYNVKQAXVDLSGGFIFAEKSLNNYNHYWSFLRRPKEIXTSVKAPDFXHTLYNLFTDIHQWWRGQSLHSSHSISRKSHR

SEQ ID NO: 113926 - protein, 54 aa, Gossypium hirsutum
  Clone ID: uC-gsflnu33B130d10b1.pep
SSYERKPGIIQKHYNHFLNKLLLKCPAYQMNRQTNPGFCWRQTRRCGTVVSTLT

SEQ ID NO: 113927 - protein, 47 aa, Gossypium hirsutum
  Clone ID: uC-gsflnu33B130e01b1.pep
NIFYFFFFLLREKVTWHLFLKMTHKNKKITIVGMSKSNLFKQIKIYS

SEQ ID NO: 113928 - protein, 58 aa, Gossypium hirsutum
  Clone ID: uC-gsflnu33B130e02b1.pep
RYSFPFPNTPCALYRNSISLIVTINRQILTPRRLFSGVKHQEVWVNSNSDWFMQESSL

SEQ ID NO: 113929 - protein, 79 aa, Gossypium hirsutum
  Clone ID: uC-gsflnu33B130e11b1.pep
SSIRILCCGMLKGCTTIRRTWRSKAARKQGGTSASEHSNKLRIGNNTGYEEEPAVEKTERELEGSLTVHRCDKRLHFGS

SEQ ID NO: 113930 - protein, 95 aa, Gossypium hirsutum
  Clone ID: uC-gsflnu33B130g11b1.pep
LSRVRPRVRPRVRFTKRFRGFSLKERMGMGLIVSCVATSVGSKRPATATRFGSSISCMLKFVAISLCILLKFRIFSTIPVLLNSVKFCYFRKLIS

SEQ ID NO: 113931 - protein, 145 aa, Gossypium hirsutum
  Clone ID: uC-gsflnu33B130h09b1.pep
AFTIGSSDKLIGSLIRKREWSLYTLPSLTYLLIGGSEVEMECFPDEHLLPSSLETLWLSQLPNLKSLEYKGFQHLASLSRLLIDSCPKLQSMPPNMLPPSLSRLCISNCPLLEERCEKEKGKDWANISHIPVIEIGGEVMMKKGQ

SEQ ID NO: 113932 - protein, 47 aa, Gossypium hirsutum
  Clone ID: uC-gsflnu33B131b02b1.pep
IEFRCQHLGNFYKLEIRIKTMPTASLLPEQHFYPSLSNPGKIADERT

SEQ ID NO: 113933 - protein, 72 aa, Gossypium hirsutum
  Clone ID: uC-gsflnu33B131b05b1.pep
DSLRVIQGDLVEESKTFAIPTQAHAMMEGGGSKWHWTLELEKLDGGIAHSETIAALVQDMSTEIDAHLTLAS

SEQ ID NO: 113934 - protein, 49 aa, Gossypium hirsutum
  Clone ID: uC-gsflnu33B131e06b1.pep
LSFVRAPVETVLENSENITLSWHTNPYSLSLGGMYPGQWTPSNLTDYNL

SEQ ID NO: 113935 - protein, 34 aa, Gossypium hirsutum
  Clone ID: uC-gsflnu33B131e09b1.pep
GAVESERPLLVDVRLGSRIIIYRALRLSVCLFDL

SEQ ID NO: 113936 - protein, 147 aa, Gossypium hirsutum
  Clone ID: uC-gsflnu33B131f03b1.pep
FSRPRRYGLLGLNGCGKSTLLTAIGLRELPIPEHMDIYHLTREIEASDMSALQAVISCDEERLKLEKEAEILAAQDDGGGETLERIYERLDALDASTAEKRAAEILFGLGFNKMMQAKKTRDFSGGWRMRIALARALFMNPTILLLD

SEQ ID NO: 113937 - protein, 134 aa, Gossypium hirsutum
  Clone ID: uC-gsflnu33B131f08b1.pep
FAKLVITTYEGKHDHDLPPTRTVTYNITGLNVDSQAHNSESGTKVEERETINSSSGAENKPSEQSNGESRTKLEVSGTVHVCTVDAPTLGPESGSNEQRSGKLDHNEESEVAGYTAHSKSSSQKTECADQHQIR

SEQ ID NO: 113938 - protein, 133 aa, Gossypium hirsutum
  unsure (1)..(133): unsure at all Xaa locations
  Clone ID: uC-gsflnu33B131f10b1.pep
GAWYFEINVVKLGETGHTRLGWSTDKGDLQAPVGYDGNSFGYRDIDGSKVHKALREKYGEEGYKEGDVIGFYINLPEGGSYAPKPPHLVWYKGQRYVRAPDAKEEPPKVVPGSEISFFKNGXVCQRGAFKDFV

SEQ ID NO: 113939 - protein, 89 aa, Gossypium hirsutum
  Clone ID: uC-gsflnu33B131f11b1.pep
ALEAQLTLDRHRGSQKEKSRVYIFQGLVAGQPAIFNGVLSIFLLHELLSQICCILHGDHPMGVFLFHTDPEHLLESQRTRGRTRGRKRG

SEQ ID NO: 113940 - protein, 54 aa, Gossypium hirsutum
  Clone ID: uC-gsflnu33B131h02b1.pep
FLSSGFLADNPGVWFMHCHLEVHTSWGLKMAWVVNDGKGPKQKLMPPPADLPKC

SEQ ID NO: 113941 - protein, 102 aa, Gossypium hirsutum
  unsure (1)..(102): unsure at all Xaa locations
  Clone ID: uC-gsflnu33B131h03b1.pep
HAYASFACRFEYVHNDQSCESSSDGAQMLRHGAPTKPXHFFAEYGMDRGFQNKXISNTSKVQDQDTAEARRKVSKAECIXKXQYFGDNTRADNDAQVTLQKF

SEQ ID NO: 113942 - protein, 134 aa, Gossypium hirsutum
  Clone ID: uC-gsflnu33B131h06b1.pep
PLVRILLSMDDVQGFFLRISNDSSFDSNVAGVLVESRVEIQHKLKGFSPARKFPQAEFAPYHNTNYEWNPIGSGIMWKSYNFPVFLLSESSTSTLQEIAMKNEKTEQAYTTNVAKFDVVMQTTKVGTHESESCL

SEQ ID NO: 113943 - protein, 35 aa, Gossypium hirsutum
  Clone ID: uC-gsflnu33B131h10b1.pep
MAGAASALFLLDIKGRVLVWRDYRGDVSAAQAERF

SEQ ID NO: 113944 - protein, 60 aa, Gossypium hirsutum
  Clone ID: uC-gsflnu33B132b05b1.pep
KNMCVHLWAEINNVVFVDNFHGYPYNTPPPILKRAMCSLCEIPSTHLLTPVNMFIETYAR

SEQ ID NO: 113945 - protein, 74 aa, Gossypium hirsutum
  Clone ID: uC-gsflnu33B132c03b1.pep
YDDRCSTIILEKSSKQTNPFSFLSTLVVMLRKWLYRAPLIPHFVLKKRYLLIRRDVIGLNLNGITQKVIPDPYV

SEQ ID NO: 113946 - protein, 49 aa, Gossypium hirsutum
  Clone ID: uC-gsflnu33B132c09b1.pep
CPHVRITPQSTGRLPGLGIVSRAIGNVKPFYHRFNEGVEGGDIYNQSPH

SEQ ID NO: 113947 - protein, 30 aa, Gossypium hirsutum
  Clone ID: uC-gsflnu33B132d09b1.pep
ATNEATAYPGGPYGPLIEGIIHNSPHVNNG

SEQ ID NO: 113948 - protein, 42 aa, Gossypium hirsutum
  Clone ID: uC-gsflnu33B132d11b1.pep
IRKSKILINCICRMLKFSFLIVCITLIHFNKPLCGPLAARVG

SEQ ID NO: 113949 - protein, 61 aa, Gossypium hirsutum
  Clone ID: uC-gsflnu33B132e05b1.pep
PRVRHGWPVRGGNQGRTGGHMTCSIKVPIPNESWIRASVYYGAEVYGCRAYILAQTLYIYL

SEQ ID NO: 113950 - protein, 41 aa, Gossypium hirsutum
  Clone ID: uC-gsflnu33B132f04b1.pep
AKGGLNPPVPSVCNYMRSRKSDSVLDQTLYPTIVSPIPDEK

SEQ ID NO: 113951 - protein, 42 aa, Gossypium hirsutum
  Clone ID: uC-gsflnu33B132f05b1.pep
KQKKNVLVLFLLIPSKLKGESMLLSLISPDLPLKCPPARTRG

SEQ ID NO: 113952 - protein, 83 aa, Gossypium hirsutum
  unsure (1)..(83): unsure at all Xaa locations
  Clone ID: uC-gsflnu33B132f12b1.pep
ALICALGLNSIVRCALRRSRRAAFKTPDKTAVRLSSTDLKKSAWRQIPAAVNGNEMDLTAYKIVRFXFGEFMVGEKVRGLPKC

SEQ ID NO: 113953 - protein, 48 aa, Gossypium hirsutum
  Clone ID: uC-gsflnu33B132g01b1.pep
VLSISTAISAGTALAVTSAVIDAGGQTTRIDTGKEYYPYTTKKRPADS

SEQ ID NO: 113954 - protein, 22 aa, Gossypium hirsutum
  Clone ID: uC-gsflnu33B132g10b1.pep
RVIPLPPAGCVLLLGLDIIVTF

SEQ ID NO: 113955 - protein, 158 aa, Gossypium hirsutum
  Clone ID: uC-gsflnu33B132g12b1.pep
PTRPRRNPAERLTFQEFFNHPFLSQGQPNEPLRSQGILGNGYPFFESRPGSTDESFQEDCLPFFLDDDSSGPEGSPSFEKKRSSMKSGYGFSPNAKDTREQTSNPLNKVKFTSKYSGTRHKLDDSSFRHESSKVSGETLYEPHKSMDQRSTSTHSRVG

SEQ ID NO: 113956 - protein, 70 aa, Gossypium hirsutum
  Clone ID: uC-gsflnu33B132h03b1.pep
VCTSFFRSPLLLASIDIGRRNRHWTRQSVGACLPLSVLHSPPLSPLNSPKSRGLVDFIYQSDLLQVLSFA

SEQ ID NO: 113957 - protein, 159 aa, Gossypium hirsutum
  Clone ID: uC-gsflnu33B132h10b1.pep
SRVRPRVRPRVRGIAPMTERGDKISITDFGGVGNGQTLNTIAFRKAIYRIQHLRRRGGTLLFVPSGVYLTDSFNLTSHMTLYLARGAVIKATQDTSNWPLIAPLPSYGRGRERPGGRYMSFIHGDGLEDVVITGENGTIDGQGDIWWNMWRQRTLQFTR

SEQ ID NO: 113958 - protein, 76 aa, Gossypium hirsutum
  Clone ID: uC-gsflnu33B132h12b1.pep
MTLQASFFNFGSISSLPCPPRTSRQRFVIRAKVEPSEKSVEIMRKFSEQYARRSSTYFCVDKGVTSVVIKGLAEHK

SEQ ID NO: 113959 - protein, 76 aa, Gossypium hirsutum
  unsure (1)..(76): unsure at all Xaa locations
  Clone ID: uC-gsflnu33B133a05b1.pep
LLGSCIYLGCYXFFFTVIFYVSSDFLFHYVNAFFGMTCCFSCFPVSESALNGDLYLAVNLCILYYDVMAMLMALSG

SEQ ID NO: 113960 - protein, 133 aa, Gossypium hirsutum
  unsure (1)..(133): unsure at all Xaa locations
  Clone ID: uC-gsflnu33B133a06b1.pep
EYFCDTGSGTRVCSGLYSCKGVTGIGLPQNAPTSTCCVYDSLMGIGSGYSLDLPKLQCSSYTSIYEFGDEEDPMKWKFGISLLYNDSYYTPACKDCETNGGXRGFNVLDESFSCXCRDGVNTTTNLFCPWYTL

SEQ ID NO: 113961 - protein, 54 aa, Gossypium hirsutum
  Clone ID: uC-gsflnu33B133b01b1.pep
YCPPCESVCSTCNVSGDIIVIICSFPNYDLDIMLEILSCKRLFIVEFIEVGTYL

SEQ ID NO: 113962 - protein, 98 aa, Gossypium hirsutum
  unsure (1)..(98): unsure at all Xaa locations
  Clone ID: uC-gsflnu33B133b03b1.pep
VLVAANGLCYLHDDCSALIVHREGXSNNVLLDSDFVAHVADYGLGKSLQDSGTCECMCAIAGSYGYIAPXYAYTLKVDDKSDVDSFGVVLSELGSGRK

SEQ ID NO: 113963 - protein, 113 aa, Gossypium hirsutum
  unsure (1)..(113): unsure at all Xaa locations
  Clone ID: uC-gsflnu33B133b04b1.pep
YSYVDTLGIIYRELKPDNMLMREDGHIMLSECDLSIRXAASNTMGGSWNSSVESKHCLYXDEPACSGPTCVHPPDRWLPAWIGPRFVVCKPYKEKKNKVKIETGHEGKPLSEL

SEQ ID NO: 113964 - protein, 53 aa, Gossypium hirsutum
  unsure (1)..(53): unsure at all Xaa locations
  Clone ID: uC-gsflnu33B133b05b1.pep
MGIAGAECIIAGFISSMWMADARISGVXSVGAWQNAHATLYSCYDASGTMGGA

SEQ ID NO: 113965 - protein, 52 aa, Gossypium hirsutum
  Clone ID: uC-gsflnu33B133b08b1.pep
LCMEHHEPVPLIETRFGCASSGFLIIVVSASSTTTAFMLVKESERKLGQHRL

SEQ ID NO: 113966 - protein, 55 aa, Gossypium hirsutum
  Clone ID: uC-gsflnu33B133b09b1.pep
YYDILEQIISIELTLSVSVMVGLNVFSLVQSFPYIKQRLFLNTAPLVWRSLRYDR

SEQ ID NO: 113967 - protein, 70 aa, Gossypium hirsutum
  Clone ID: uC-gsflnu33B133b10b1.pep
RWIHGVLCLCEHPYRVVHRKIRQRARALIWALPPLSWLTCRSQFQPSLLAINHSFLSPPSDYVALSRTIS

SEQ ID NO: 113968 - protein, 44 aa, Gossypium hirsutum
  Clone ID: uC-gsflnu33B133b11b1.pep
MYFSEGSDLHEKFVANKHVEDFVTIDKLIDAGEASYNMWRSPDP

SEQ ID NO: 113969 - protein, 60 aa, Gossypium hirsutum
  Clone ID: uC-gsflnu33B133c02b1.pep
RGGPPPSVRGISRRTCNVMVYLSSPSRSPRIVLLSSRPTMLVLESGYTRVFSPHSLCRDR

SEQ ID NO: 113970 - protein, 34 aa, Gossypium hirsutum
  Clone ID: uC-gsflnu33B133c05b1.pep
GWTGVSFCRLCLKTRSYTLRSPPSFVGAHYRTSG

SEQ ID NO: 113971 - protein, 79 aa, Gossypium hirsutum
  Clone ID: uC-gsflnu33B133c08b1.pep
PDDTQGKRGRVLDLARKLKHRGPDWRGLYQHGDCQACHERSAKIDPASGDEPVFKGGKFLAENETGERSTQCITGVEDA

SEQ ID NO: 113972 - protein, 37 aa, Gossypium hirsutum
  Clone ID: uC-gsflnu33B133c11b1.pep
PYLFVMFVSLTLRRFSALIHTFVLHLAPYSCRTLSDA

SEQ ID NO: 113973 - protein, 104 aa, Gossypium hirsutum
  Clone ID: uC-gsflnu33B133c12b1.pep
LVASPLEVISESLCVSWVRASVTVAIVSASTVCRAFVRLFVFLRALWSMSVPHKLSHWPLLIRVPVLIMADGANILLFVPVNKHADPQNSSPYRGRPVSYCQAP

SEQ ID NO: 113974 - protein, 65 aa, Gossypium hirsutum
  Clone ID: uC-gsflnu33B133d04b1.pep
TIVHFDAPVRAIPSWFLTVPPSFVSGHPYLSGFSRPSLCGLFLLTPRYSLKSPPSFFGACLRTSG

SEQ ID NO: 113975 - protein, 32 aa, Gossypium hirsutum
  Clone ID: uC-gsflnu33B133d07b1.pep
LSIKGGIVYRLLDLQPQRTTVMIRFRASPEGS

SEQ ID NO: 113976 - protein, 95 aa, Gossypium hirsutum
  Clone ID: uC-gsflnu33B133d12b1.pep
MTEAAIRKKPGMASVKDVRLLQDGSASDGFVPVRDTRRRPNTGPRATDIYLADNGALSYGMDQVGQGNKIRRALKDEKFAARRAILPALQAEEDE

SEQ ID NO: 113977 - protein, 76 aa, Gossypium hirsutum
  Clone ID: uC-gsflnu33B133e08b1.pep
LSMIHQSISQNRRLSFMYYVHPFHNSGYAARISPKFLKVIAAANFIGRSITNLMTHSQFHSLFLFIQTHACLNLPP

SEQ ID NO: 113978 - protein, 59 aa, Gossypium hirsutum
  Clone ID: uC-gsflnu33B133e11b1.pep
GTSPFEAVPFRISRPSFSFGPPDVIVMHASVTLRSLSVIVPRDVLNLAPSGCRALWCAR

SEQ ID NO: 113979 - protein, 36 aa, Gossypium hirsutum
  Clone ID: uC-gsflnu33B133f05b1.pep
YCFSQVCLFAVVFVSLIVGRYHPLFHAVARCSVRVG

SEQ ID NO: 113980 - protein, 49 aa, Gossypium hirsutum
  Clone ID: uC-gsflnu33B133f06b1.pep
YLSPHKMIEAAVTQKYGLVNPTAVSVCFHKIILYKPPPHCIARLSVRTG

SEQ ID NO: 113981 - protein, 53 aa, Gossypium hirsutum
  Clone ID: uC-gsflnu33B133f09b1.pep
DHDVDYHAALMMWRGASFDMLLARMPWFPQKAHRGEATYSPYCARLVPPHMNR

SEQ ID NO: 113982 - protein, 54 aa, Gossypium hirsutum
  Clone ID: uC-gsflnu33B133g06b1.pep
SPSKSYLAPHSLFWAALTQSHCLVNPNTVILGYLKVILNSLHLHTIARVCVRVG

SEQ ID NO: 113983 - protein, 35 aa, Gossypium hirsutum
  Clone ID: uC-gsflnu33B133h04b1.pep
RHSLLVPHAVTLCFLNVILYNLHLHIIARESVRIG

SEQ ID NO: 113984 - protein, 55 aa, Gossypium hirsutum
  Clone ID: uC-gsflnu33B133h10b1.pep
SRVYRSTFQPCSQAYSWTWLLNANPTNRAATVDAYLTNPFGRQLNIHFKKQKTYK

SEQ ID NO: 113985 - protein, 51 aa, Gossypium hirsutum
  Clone ID: uC-gsflnu33B134a04b1.pep
NLSRYIQIYIHVLSLFGRLCFIYSRVGPYTAIRCIYISTRYPYVESYGFYL

SEQ ID NO: 113986 - protein, 113 aa, Gossypium hirsutum
  Clone ID: uC-gsflnu33B134b02b1.pep
FSSAQTSGLVAGIVVADPYEYCKFTTPTTHRDLKGSRGEMIFFKKDPVLGDFVESNIKTTGNPGLQGGPHSHTIARLAVGLQHAQSPEYKAYQNQVVSKCRALAGRKGELGYT

SEQ ID NO: 113987 - protein, 68 aa, Gossypium hirsutum
  Clone ID: uC-gsflnu33B134b03b1.pep
PLYPWMTVDLTLRLRQIVDDGFVHKNDHCDACSSHIYFRGRHSEVARWLAVLSFISAQNTACVGEHEG

SEQ ID NO: 113988 - protein, 170 aa, Gossypium hirsutum
  Clone ID: uC-gsflnu33B134b08b1.pep
LRVREFALQLFDALARKRNIHGDSIDKAHLKEFWDQISNQSFDARLQTFFDMVDKDADGRITEQEVKEIISLSASANRLSNIQKQAEEYAALIMEELDPDRLGYIMINNLEMLLLQAPNQSVRGESRKLSQMLSQKLKPTYDGNPVRRFCRNTKYFLQDNWQRAWVTVLW

SEQ ID NO: 113989 - protein, 111 aa, Gossypium hirsutum
  Clone ID: uC-gsflnu33B134b12b1.pep
KVESKGGGVKTPKKSDDQGGSRHRKLKGTGSFSSKDMIFRADKIDLKSLDIQLEKHLSRVWSRNVDNQRPAEEWEIDLAKLDLRHVVAHGTYGTVYRATYDNRTRGRTRRK

SEQ ID NO: 113990 - protein, 43 aa, Gossypium hirsutum
  Clone ID: uC-gsflnu33B134c01b1.pep
NVSLLTNFQLHYGGRVLRYGTNMRTNEPAYARTDHRRFVAMHE

SEQ ID NO: 113991 - protein, 62 aa, Gossypium hirsutum
  Clone ID: uC-gsflnu33B134c02b1.pep
LSLPPTQAASWAELKPRTANQLPTQICRSRTEIWPEQAPQRACWCTTRSSPICRHARVRSTV

SEQ ID NO: 113992 - protein, 48 aa, Gossypium hirsutum
  Clone ID: uC-gsflnu33B134c05b1.pep
MRPPTHAVFWAGLKAKTASDLATALCRARKEIRHGHAPQRGCLCTNRT

SEQ ID NO: 113993 - protein, 62 aa, Gossypium hirsutum
  Clone ID: uC-gsflnu33B134c08b1.pep
ITVDHTHPLHQIVIVFFVHNNPHCCACPSHISFLDLHSELARWFAVLALNSARNTACVDGRV

SEQ ID NO: 113994 - protein, 54 aa, Gossypium hirsutum
  Clone ID: uC-gsflnu33B134d01b1.pep
RQIVIVRFVHKKPHCDACSSHFSFRARHSELAFWFAVLAFISARNTACVGEHVG

SEQ ID NO: 113995 - protein, 44 aa, Gossypium hirsutum
  Clone ID: uC-gsflnu33B134d02b1.pep
HLLTPGLPLILLINDGNSSLIGSYTRMIIAAHVLAHISLLDLHS

SEQ ID NO: 113996 - protein, 52 aa, Gossypium hirsutum
  Clone ID: uC-gsflnu33B134d04b1.pep
YRLSGSSISPTRRSSFRAQESSLLRLSFPFLIPRPKYLTCDIPCIHTFHSRT

SEQ ID NO: 113997 - protein, 55 aa, Gossypium hirsutum
  Clone ID: uC-gsflnu33B134d06b1.pep
LTCSPTHAVLWAGMILNTARAMPTQICRPRNEICPDQAPQRSCLSTKRTTPSCRH

SEQ ID NO: 113998 - protein, 75 aa, Gossypium hirsutum
  Clone ID: uC-gsflnu33B134d10b1.pep
FLLSPPRQFLVPSMWVSWDGSLNPVFFVVLVPRMPGSWLLRCLLLPLVLSSLHPSMSGPRVFNTLAVTVLVVGRV

SEQ ID NO: 113999 - protein, 94 aa, Gossypium hirsutum
  Clone ID: uC-gsflnu33B134d11b1.pep
MGGCLTKNKDPMPQHNGYRSGATTTAAVHQQRYQDPVRPAPIQPQVYHIPQKPGTQTPWKPAVPAPSPKPAPNIDTILGKPFEDIRMHYTIGKE

SEQ ID NO: 114000 - protein, 61 aa, Gossypium hirsutum
  Clone ID: uC-gsflnu33B134e02b1.pep
RCSDSSIAATRRCSFRASACSLRRLFGSFLLSGPAFLSWDFACGFPFLFRPGCRLGGRTHW

SEQ ID NO: 114001 - protein, 48 aa, Gossypium hirsutum
  Clone ID: uC-gsflnu33B134e03b1.pep
RFVHQQPRRGACQSHISFLTRHIAVEIALAVLAFISVHSTACVGDHEG

SEQ ID NO: 114002 - protein, 62 aa, Gossypium hirsutum
  Clone ID: uC-gsflnu33B134e04b1.pep
YVFVHACGIMYGNETYYCKGYGKFTISVEELDMARTSVPMRILVHEPIYDELVSLVSKSNGN

SEQ ID NO: 114003 - protein, 62 aa, Gossypium hirsutum
  Clone ID: uC-gsflnu33B134e05b1.pep
LPLIYTQPLHQIGIVRFVHQNPHCDACQSHFSYSALHISPAFSFAVLAFISVHNTACVGGKK

SEQ ID NO: 114004 - protein, 38 aa, Gossypium hirsutum
  Clone ID: uC-gsflnu33B134e06b1.pep
KLIMQGISQLKYVGRGMRKETDKRTNEAFCVRTELRRF

SEQ ID NO: 114005 - protein, 50 aa, Gossypium hirsutum
  Clone ID: uC-gsflnu33B134e09b1.pep
LSDSVMTANLRSFPCTSDASLLVMSFTFLILHPAQFTWQIVCNFNFKFYT

SEQ ID NO: 114006 - protein, 88 aa, Gossypium hirsutum
  unsure (1)..(88): unsure at all Xaa locations
  Clone ID: uC-gsflnu33B134e10b1.pep
STRPATRSYLERDTHPKLAQHAGALCGGPYYGDRSWDNKLAGAQVTTSRLRKLLSSRAXYAEISCPFHQLASIIIGSLLPVFTTVAQN

SEQ ID NO: 114007 - protein, 65 aa, Gossypium hirsutum
  Clone ID: uC-gsflnu33B134f07b1.pep
PLITVTLLMQLRQIGVDRFVHKKPRWDACQCLFSFRDRHSEVARWFAVLALITARNTACVDGRVR

SEQ ID NO: 114008 - protein, 82 aa, Gossypium hirsutum
  Clone ID: uC-gsflnu33B134f08b1.pep
SFLLYSLYYPPFDNVWTIRSHLLWTMSLHQIFVRELVHKMRPWYACHLLFSSCDLPSILSRLYPTLFLNTPHSTVCVSGRVG

SEQ ID NO: 114009 - protein, 47 aa, Gossypium hirsutum
  Clone ID: uC-gsflnu33B134g05b1.pep
NLKPPANSQLNYAGPGRRYGPDTRRNEPADARAEQRRFAAMDEQEQR

SEQ ID NO: 114010 - protein, 85 aa, Gossypium hirsutum
  unsure (1)..(85): unsure at all Xaa locations
  Clone ID: uC-gsflnu33B134g09b1.pep
GRRALHSAWGICESKCAQNLMEGLPRMDPWYKTANTALNYGTGXGRTDCLALLLENGGYVKLXNMDGKARMVVSTLNTQYKVLTT

SEQ ID NO: 114011 - protein, 145 aa, Gossypium hirsutum
  unsure (1)..(145): unsure at all Xaa locations
  Clone ID: uC-gsflnu33B134h02b1.pep
VLQXTLNMPKDLMVSKMAGGTTVVNPFTKYALTMSPVAMSLEELIPSTHLKSHIYAIIIRTSLVISTLIVGLTIPFFGLVMSLIGSLLTMLVTLILPPACYLSILRGKVTRIQRTLCIMVITVGVVSSAFGTYSALSKIVENLRS

SEQ ID NO: 114012 - protein, 61 aa, Gossypium hirsutum
  Clone ID: uC-gsflnu33B134h06b1.pep
PLVRPRMRYYVRDLNLILAAISQVHFSGRGLRYEPDMRPNDASDAQDNQRQVGAINESEQL

SEQ ID NO: 114013 - protein, 84 aa, Gossypium hirsutum
  Clone ID: uC-gsflnu33B135a02b1.pep
RAVTMNDMAVTEVAMHISLSVRHHHHPLSSRFLQSWTLHRVQLADHSPPPSPWPPSAASALQMAVVVAVPALFCGHSSLSLKAM

SEQ ID NO: 114014 - protein, 53 aa, Gossypium hirsutum
  unsure (1)..(53): unsure at all Xaa locations
  Clone ID: uC-gsflnu33B135a11b1.pep
HLYKHCYFFYYYVLFFIVFWNEIKITXEKPKPIIPKRGRSLLRSPRLTPFGAR

SEQ ID NO: 114015 - protein, 64 aa, Gossypium hirsutum
  Clone ID: uC-gsflnu33B135b05b1.pep
SALNILLFCVESACGILLLPTSANLNLNQSQTPTTSSCYGGKRPRDALKLPVCADLLGGLLNGT

SEQ ID NO: 114016 - protein, 63 aa, Gossypium hirsutum
  Clone ID: uC-gsflnu33B135c11b1.pep
PIFFDSKFTSQVPRYAMLSCLAVLCWISGRWCCMSGYRQHRFCACFRSQLVLKPHQCSCMFFR

SEQ ID NO: 114017 - protein, 104 aa, Gossypium hirsutum
  Clone ID: uC-gsflnu33B135d02b1.pep
PTRTPTRPLERVSKLEQVIEGDETNLNKEEEKVICLPQLRPLVLDELPNLVSFSPVGYHFVFQPLRCLKVKGCPNITTRFSDDSKQLVHAKTQVHYPSKLKYKL

SEQ ID NO: 114018 - protein, 48 aa, Gossypium hirsutum
  Clone ID: uC-gsflnu33B135d03b1.pep
PMRMFTRPVEMVSLKDKPRAAESTKSKHSLKTVTGVTARHCLLLAEAG

SEQ ID NO: 114019 - protein, 38 aa, Gossypium hirsutum
  Clone ID: uC-gsflnu33B135d07b1.pep
CSSSSTRVQRTHACVPYCRSRSLCKSEKCKRTLVRTSM

SEQ ID NO: 114020 - protein, 39 aa, Gossypium hirsutum
  Clone ID: uC-gsflnu33B135e05b1.pep
TFYYPCNSLQPNYPFTPISRYQLTNKLHKINCTRDRKHK

SEQ ID NO: 114021 - protein, 50 aa, Gossypium hirsutum
  Clone ID: uC-gsflnu33B135e07b1.pep
GHKHAFADDGFGRNSMACAIAAFGRHVNQTKDLDRILILPGRKSLISSWE

SEQ ID NO: 114022 - protein, 25 aa, Gossypium hirsutum
  Clone ID: uC-gsflnu33B135f01b1.pep
VLLLSLNPKTNHSPSFTILLSTIIR

SEQ ID NO: 114023 - protein, 80 aa, Gossypium hirsutum
  unsure (1)..(80): unsure at all Xaa locations
  Clone ID: uC-gsflnu33B135f02b1.pep
TKIWLGNRTAITRGDCEPLARPDNETHDARAXGDPSLQDQWAANKMIVDDENIIMGAANSNQRSMDEARDLEKGMGGSQP

SEQ ID NO: 114024 - protein, 86 aa, Gossypium hirsutum
  unsure (1)..(86): unsure at all Xaa locations
  Clone ID: uC-gsflnu33B135f08b1.pep
MSRISWNHFPIITFLSFVLVVFLHGVTAATFTFINKCDYTVWPGLLANPGSPTVESTSFELRNGGSRYFQAPTGWAXRFWGRTSCS

SEQ ID NO: 114025 - protein, 120 aa, Gossypium hirsutum
  Clone ID: uC-gsflnu33B135f11b1.pep
FIISPQWNQEFQLAVKDPQHDLVRFRVFDADTIKDDLIGEASYPLFQIANGQPVDTWLSLNPDKAGAIHFRAQLTGPQQGGAHGAPQGQPQPQPGYGQPSPGYGQPPPGYGQPPPGYGQP

SEQ ID NO: 114026 - protein, 64 aa, Gossypium hirsutum
  Clone ID: uC-gsflnu33B135g02b1.pep
EHQKAASSPGICSLVNHSHPLWLEWCDTHGGLSATAMEVLWNGNNALLCELRDLTCVDHTSQRM

SEQ ID NO: 114027 - protein, 35 aa, Gossypium hirsutum
  Clone ID: uC-gsflnu33B135g03b1.pep
PHNNVQPILPWSASCSYRLTIKPDQFNWTRGRKQK

SEQ ID NO: 114028 - protein, 35 aa, Gossypium hirsutum
  Clone ID: uC-gsflnu33B135g04b1.pep
PHNTVQRNFAYSASSRYRPTIKPDQLNWTRGRTNR

SEQ ID NO: 114029 - protein, 58 aa, Gossypium hirsutum
  Clone ID: uC-gsflnu33B135h02b1.pep
LKMIRPASSMQAARAAGLRRVRIRRSMASPTIAVSIMPVSHDPAGLSSTKPVIPRFIA

SEQ ID NO: 114030 - protein, 36 aa, Gossypium hirsutum
  Clone ID: uC-gsflnu33B135h04b1.pep
LTCPATRPVYLVRPIGSPIAAASTSSMLSLTSVTRV

SEQ ID NO: 114031 - protein, 82 aa, Gossypium hirsutum
  unsure (1)..(82): unsure at all Xaa locations
  Clone ID: uC-gsflnu33B135h08b1.pep
FFILIIFSFLYFSSFFSXSFFFFFFFFFFFFFFFFFFFFFFFXXXDPQANFGNKKTLKCNLHKKNMFPNIQNSNGQCMQFTS

SEQ ID NO: 114032 - protein, 58 aa, Gossypium hirsutum
  Clone ID: uC-gsflnu33B136a07b1.pep
MKSTTLHNHPALNDPNPRSNYYSVCCLQSKTRKKVEPTIRHTPTYVKPIFTRLRVTIL

SEQ ID NO: 114033 - protein, 68 aa, Gossypium hirsutum
  Clone ID: uC-gsflnu33B136a09b1.pep
SFLAPMGSFTRGLGLQRQLHFHLSSSTGSDPSSTLRDACIDTVLICPEGIGVKLRPLNAQAKMEIGGV

SEQ ID NO: 114034 - protein, 88 aa, Gossypium hirsutum
  Clone ID: uC-gsflnu33B136a11b1.pep
SLTRPLIFFLFIHSFSPLCLLFLPFFLRFCFYFPRHYIINLITKNRLFLLSIIAPFLHLWWCRLGLISPIFLSLLCLFLLLFYCCFPP

SEQ ID NO: 114035 - protein, 56 aa, Gossypium hirsutum
  Clone ID: uC-gsflnu33B136b02b1.pep
TVAMILPGITLSIASNVINLQNMYFMQNCAIYFPLSSLYLNKERLIQYIRQEWMSK

SEQ ID NO: 114036 - protein, 78 aa, Gossypium hirsutum
  Clone ID: uC-gsflnu33B136b03b1.pep
SQKKRFFFGPGKWGEVLQDPVDFITESNLDGLMVPRPRFKTRPVKTLGAKKWQAAFPLNGHWDMGKTFHGFHRGGIHP

SEQ ID NO: 114037 - protein, 105 aa, Gossypium hirsutum
  unsure (1)..(105): unsure at all Xaa locations
  Clone ID: uC-gsflnu33B136b06b1.pep
YQKFEGDKRYLMERTLWGHLPLLVRANSKESVEYILQTLWRTRKTGLDADDRRLICQMLQLQNESDLDPVIIHSLTQMLIXXSKDYSIWFLLNILLYFLLPLLFL

SEQ ID NO: 114038 - protein, 97 aa, Gossypium hirsutum
  Clone ID: uC-gsflnu33B136b08b1.pep
KAFCFGPEKRVFRLCFFLSLVFCNSPKSYSFLKYRARLSLYYAKEALARDTPPSVFAPNIYAAPRRRSAIGPTRRKLGWTRQLVPGPGRRAGFPYSE

SEQ ID NO: 114039 - protein, 140 aa, Gossypium hirsutum
  Clone ID: uC-gsflnu33B136g07b1.pep
MSKSRLEGKVALITGAASGIGEETARLFVEHGAFVIIADVQDDLGNKVAASIGLDKVSYCHCDVRDEKQVEATVSYAVEKYGRLDILFSNAGVYGPLPGILELDVNGFDNTMATNVRGVAATIKHAARAMVAKNIRGSII

SEQ ID NO: 114040 - protein, 134 aa, Gossypium hirsutum
  Clone ID: uC-gsflnu33B136h02b1.pep
IFPPRVSLRLHRARVIWYWPPQLDTYHGVPPRPSSGYELRSYSASYAQSQMANNRDFKLKKGKSTSASSSKSWSFADPEFQRKKRVASYKMYSVEGKAKGSLRRSFRRLKVKYTQVVYGGGDYGSFCSSYAYLC

SEQ ID NO: 114041 - protein, 62 aa, Gossypium hirsutum
  Clone ID: uC-gsflnu33B136h04b1.pep
YISCVVVSYLCSHRGAMLNYNMHGRCCSFFICHALSQRLGSSLFRYLVVHHSDRGAYNSLLP

SEQ ID NO: 114042 - protein, 48 aa, Gossypium hirsutum
  Clone ID: uC-gsflnu33B136h08b1.pep
SRRLSRRARPVLQLEVPAVNSLILCIATKIAPELISSRRPRWHPMVGI

SEQ ID NO: 114043 - protein, 86 aa, Gossypium hirsutum
  Clone ID: uC-gsflnu33B136h12b1.pep
HNHEGTSALLVNVVPACCQSPHTIVWHIVLIDVVGSDTLGLPLLILETQSPGPAYLTEALAVTLHSINHGGLLTLSSNGRKGLLAT

SEQ ID NO: 114044 - protein, 73 aa, Gossypium hirsutum
  Clone ID: uC-gsflnu33B137a01b1.pep
MRSSTRAHCYIEYADANIARTVHHRWEGAETPNSGAIGMPLQYTQNAIGRRKDSNHPIASADANGAPLAMTYH

SEQ ID NO: 114045 - protein, 60 aa, Gossypium hirsutum
  Clone ID: uC-gsflnu33B137b01b1.pep
KAMGEAQMFERATGGSLVGITQANQREMEDKPVKLGEQQRDIPSEGGGGPGRVGPPEGTP

SEQ ID NO: 114046 - protein, 56 aa, Gossypium hirsutum
  Clone ID: uC-gsflnu33B137b02b1.pep
EFPICFKYFVSLDSKVCHVNNHDKVKKKKRAGTKASTILATSKLHMCKYISKSKCT

SEQ ID NO: 114047 - protein, 83 aa, Gossypium hirsutum
  Clone ID: uC-gsflnu33B137b04b1.pep
AEWPFGFFTDNAWVCSVIVVSRFGPNVSLVSFLRMLVSDNTSMRHLIRPQLVGPVSRNHAFSITCTSWWIDELVIASPVRTKM

SEQ ID NO: 114048 - protein, 37 aa, Gossypium hirsutum
  Clone ID: uC-gsflnu33B137c05b1.pep
FSPYNFYTYWTFRLIWKLTHDILIKPRLRPCVPGREE

SEQ ID NO: 114049 - protein, 35 aa, Gossypium hirsutum
  Clone ID: uC-gsflnu33B137c09b1.pep
GNTVLYSKYAGNDFKGNDGTSYIALRASDVMAVLS

SEQ ID NO: 114050 - protein, 108 aa, Gossypium hirsutum
  Clone ID: uC-gsflnu33B137c10b1.pep
FFPRVRGRVGSPGVSFSDGKHANAAEFASGARAFTEGLEAQEISSEEKALMTKLTEEKNKAIQQSNKLRHELDLFKREGSKSGGGVSFMFVMLIGLLGIIMGYIMKKW

SEQ ID NO: 114051 - protein, 52 aa, Gossypium hirsutum
  Clone ID: uC-gsflnu33B137e02b1.pep
CSLKELDLDVHHASVSVVKDLMIQQANVKMGSRFFTQEQLKSALTTKLGDAR

SEQ ID NO: 114052 - protein, 154 aa, Gossypium hirsutum
  Clone ID: uC-gsflnu33B137e05b1.pep
ILQTHASMMNTANMPFTRHGVTPATNSMNFQGGGFSIEKLKPHMMIGAKMSIASTSSHEAISKGQVNYSDQESEGLLNRNRMNDSRRSIGIKRSSEAREKGTEEQSLEPKNKKLTLEELGERDGKQINKIMTDRLNRQIEQDIKSDMELVHTKK

SEQ ID NO: 114053 - protein, 44 aa, Gossypium hirsutum
  Clone ID: uC-gsflnu33B137e09b1.pep
ERMESHSRLKYIYFTSSTMLSMLGSIGQNDICCRHSFSILPFNT

SEQ ID NO: 114054 - protein, 47 aa, Gossypium hirsutum
  Clone ID: uC-gsflnu33B137e10b1.pep
NGPPLFLLLILFFFYFFFFYLFFFFFFFFFFFFFFFWFHRRLTITYK

SEQ ID NO: 114055 - protein, 55 aa, Gossypium hirsutum
  Clone ID: uC-gsflnu33B137f09b1.pep
NLSIRKIHKDLTSMPSKQIFQHTHKMNLSSRRSTILFISPFQTKIIDHGVTRLKK

SEQ ID NO: 114056 - protein, 47 aa, Gossypium hirsutum
  Clone ID: uC-gsflnu33B137g01b1.pep
TVNLNYLTVVFSFKVKIVIENCYIYIRDIILLNTVIVNFRCFISIMT

SEQ ID NO: 114057 - protein, 78 aa, Gossypium hirsutum
  Clone ID: uC-gsflnu33B137h05b1.pep
LSEIAIKTCSYFVDGKRDMNVDEFNGWLKGFNEDNDRRISKYELANTERMVCWEKSKHGSDVNGNGFIHDNERFCFFF

SEQ ID NO: 114058 - protein, 158 aa, Gossypium hirsutum
  Clone ID: uC-gsflnu33B137h09b1.pep
SSPAGTRRDGLAGSTHAFFGADLPAQDAGVEVRLDDHQLRGLERDRDGDGGVRGQHLLLAGGPVQGVGLTDQVRDLGRDAVGRRFGTEPGQYAEGLVPGVVVRAPRRFRLDDGLRLPAERRHAVQQHRGDRDGPELRADVFRPGAHDLLQRTWLPVML

SEQ ID NO: 114059 - protein, 110 aa, Gossypium hirsutum
  unsure (1)..(110): unsure at all Xaa locations
  Clone ID: uC-gsflnu33B137h11b1.pep
RKTKDLVCLRVVSSSSSLLYLLGNRTNIGLKRTGELDPKAFNDTCKLRFPTDEAEIQATTLCSSWQENLKNPDXTSNFQEKLTNLKLEWGEEIYNAVVTALKEHFCSNLL

SEQ ID NO: 114060 - protein, 169 aa, Gossypium hirsutum
  Clone ID: uC-gsflnu33B138a09b1.pep
LIALTGIVYIEDHFGYRVGFGVPAILMLLSALVFFLASPFYLKQQASKSLLTGFVQVIIVAYKNRNLTFPLPNSTASYHHKRDSNVVAPTDKLRFLNKACIIKNPEQDIALDGSAANPWSLCTVEQVEELKALIKVLPLWSTGIIMSINLSQNSFPVLQASSMDRDLTK

SEQ ID NO: 114061 - protein, 142 aa, Gossypium hirsutum
  Clone ID: uC-gsflnu33B138b10b1.pep
MEWRSCYLDMVLVPLSLAMSLAYHWWLWRKVRSQPLTTIIGTNARGRRFWAFAIMKDNEKKNILAVQTLRNTIMGSTLMATTSILLCAGLAAVISSTYSIKRPLNDSIFGAHGEFMVSLKYVTILSFFLFSFFWYSFSIRFI

SEQ ID NO: 114062 - protein, 107 aa, Gossypium hirsutum
  unsure (1)..(107): unsure at all Xaa locations
  Clone ID: uC-gsflnu33B138c05b1.pep
MANPVAASSLALTAISMVKPPVMAPHGHGGHHYYNKRYGPGSPKSYQCPSQCTRRCCQTQCHTPCVSFCQKXFMTCLCXVPPGYYGIAHDCPWYNDWKTRAGGPKCP

SEQ ID NO: 114063 - protein, 85 aa, Gossypium hirsutum
  Clone ID: uC-gsflnu33B138c06b1.pep
TERRVITTKAKQASQRSPIATTSFCLTLGSIARRPGFTHLETGGKPVFYMALSSGHSLCRKTAHREWPAGSPTSVGKKKSPLLMR

SEQ ID NO: 114064 - protein, 151 aa, Gossypium hirsutum
  Clone ID: uC-gsflnu33B138c10b1.pep
LRVRLKGDDVDGGLNLEEESEKTVLKKEYPVDISLPDINNGIYGTDDFRMYTSKVKPCSRAYSHDWTECPFVHPGENARRRDPRKYPYSCVPCPEFRKGACPKGDACEYAHGVFESWLHPAQYRTRLCKDETGCTRKVCFFAHKPDELRPV

SEQ ID NO: 114065 - protein, 127 aa, Gossypium hirsutum
  Clone ID: uC-gsflnu33B138c12b1.pep
YLPFYRDSYGAGSVDFIFGNAAVVFQNCKLVARKPMNSQSNMVTAQGRLDPNHNTGTSIQNCNILASADLEPVKGSIKSYLGRPWKEYSRTVVMQSYIGDHIDPSGWSVWSEDFALKTLYYGEYMNR

SEQ ID NO: 114066 - protein, 38 aa, Gossypium hirsutum
  Clone ID: uC-gsflnu33B138d03b1.pep
STRTRNWLTIPKALQSCRHEWMKDALENGFCKWLAQNK

SEQ ID NO: 114067 - protein, 52 aa, Gossypium hirsutum
  Clone ID: uC-gsflnu33B138d04b1.pep
LTRTTKSPLKRGVLTTLGKGKNRRSRNNEDARSNTNNIIEGYNVARAGSHGI

SEQ ID NO: 114068 - protein, 38 aa, Gossypium hirsutum
  Clone ID: uC-gsflnu33B138d06b1.pep
GSTYSTKKVGTKRLGGSHSSLGKPKSPVGEHSKSYEIT

SEQ ID NO: 114069 - protein, 68 aa, Gossypium hirsutum
  Clone ID: uC-gsflnu33B138d08b1.pep
HLLQGLTLHIRPHEMKHPSLLTGRRTVSSIVLHNVSVHAGILIVHRKSEEYAPMALSVFSGNEDTLCH

SEQ ID NO: 114070 - protein, 49 aa, Gossypium hirsutum
  Clone ID: uC-gsflnu33B138d09b1.pep
FYFYQFRILKDLNENFSILGGRIPSPRALPLDGYKHDAVHRLNIKHKTI

SEQ ID NO: 114071 - protein, 170 aa, Gossypium hirsutum
  unsure (1)..(170): unsure at all Xaa locations
  Clone ID: uC-gsflnu33B138d11b1.pep
FLTRGRTRGRRRGDGIQDLNKAAGTLXEVQKRRIYDITNVLEGIGLIEKKLKNRIQWKGVYVSRPGEVDENVAALQAEVENLHNQERXLDGQIREMQERLRDLSEDKNXNNKWLFVTEEDIKSLPCFQNEMLIAIKAPHGTTLEVPDPDEDDDSLQRRYRIVLGSSNFQW

SEQ ID NO: 114072 - protein, 58 aa, Gossypium hirsutum
  Clone ID: uC-gsflnu33B138e01b1.pep
QTRLLEKCLSTHSFYSSTLGFLIDKAFLVNLASKIAMHRALTLATLTVVAITEESNGP

SEQ ID NO: 114073 - protein, 31 aa, Gossypium hirsutum
  Clone ID: uC-gsflnu33B138e05b1.pep
VTFTIKSVLPRGVILSRGERENHLSVLYAPS

SEQ ID NO: 114074 - protein, 51 aa, Gossypium hirsutum
  Clone ID: uC-gsflnu33B138e06b1.pep
TGSSILHQDVSVHAGDLMVLGRVVCFAGVVLPPPSGNQDPPWENTLSRASN

SEQ ID NO: 114075 - protein, 54 aa, Gossypium hirsutum
  Clone ID: uC-gsflnu33B138e07b1.pep
FKTGGSIMHHNVSPHAGHLIVLRTPVHNAATALPFSSGIHKTPPQNTLTRTRNR

SEQ ID NO: 114076 - protein, 46 aa, Gossypium hirsutum
  Clone ID: uC-gsflnu33B138e08b1.pep
NRVFYPASQCELPCWSTHGTRKGRTLCWDGFQLSLRKPKYPLLEDS

SEQ ID NO: 114077 - protein, 78 aa, Gossypium hirsutum
  Clone ID: uC-gsflnu33B138e09b1.pep
PLVKTPPRKFNLGPPKKKFKLSIPREVKLGPLKGPPLFFFFFLIFFFFFFFFFFFFVVFFFYFFCIFFFFLTKDKYNS

SEQ ID NO: 114078 - protein, 85 aa, Gossypium hirsutum
  Clone ID: uC-gsflnu33B138e11b1.pep
LYALFVPFSFLVVMLVIYPSLFFFCSRCSIQSLIPFFSFENGIFLILHQINKCKSGNASLPMSANGTGANLKPMRRFMKKVILNY

SEQ ID NO: 114079 - protein, 51 aa, Gossypium hirsutum
  Clone ID: uC-gsflnu33B138f06b1.pep
ATCTTKSVLTRGILVCRGMSENHPSGENGPAKAHEVSSMDGHIVEQDGAHG

SEQ ID NO: 114080 - protein, 159 aa, Gossypium hirsutum
  Clone ID: uC-gsflnu33B138f12b1.pep
RFGPSYWISVCCCIDHKVPIMLVSFTLCKQTLSLPHKPPGELKSNFFRPRLEKEKVVIIMGATGTGKSRLSIDLATRFPAEIINSDGTRHNDQEDPEEERCGVPHHLLGEISPYTDFTATDFVDMASHAMDSALSGGRVPIIARGWNSYIEALVDDEGL

SEQ ID NO: 114081 - protein, 169 aa, Gossypium hirsutum
  Clone ID: uC-gsflnu33B138h06b1.pep
PDAEGSDDGGEPYENNPAAPPEALKKDKKKDKKDNKKKKHKKDRPYLPCKLASAVPISPDTKLFRFQVPADHAHLVRALPSPVAHIRSQVKLPPLPHDPTTTELLKGRPYTVLRQFPEPTGETMSAAEEKDHYLQVMIKRYDTFGVRAHLHFLNEGDTEQMQLIDHDKH

SEQ ID NO: 114082 - protein, 83 aa, Gossypium hirsutum
  Clone ID: uC-gsflnu33B139a01b1.pep
MHNLKKIVLLLFLVSTFLLSTSMAGRQSKFVNMLAEEVDAAFEEISVEGEAIHERLLRANTKDYGRYDPTPALVKPPFKLIPN

SEQ ID NO: 114083 - protein, 183 aa, Gossypium hirsutum
  Clone ID: uC-gsflnu33B139b02b1.pep
FRLGDTPSSPGRTVGEESSPSITPIPSAEADQQSTLASGSSVLLVDNQGNSLNNRSPNQSPNSQDRAGPSEFQSFSESLKSRFNAASMRYKESISKSTRGWKERFFSRNTSMSDLGSQVRREVNAGIATVSRMIERLETRDDRTNTATVSNSSEDSSNLESNNHQTSDAGEGNSSIETSAQAP

SEQ ID NO: 114084 - protein, 78 aa, Gossypium hirsutum
  Clone ID: uC-gsflnu33B139b11b1.pep
RFLPPENTICCSVRVARVWPERSVPYSFLSLLQQSVRKSSTRPIHSKSCRIIFVVSLARYTSLLVSILTYCGRTTCCL

SEQ ID NO: 114085 - protein, 63 aa, Gossypium hirsutum
  Clone ID: uC-gsflnu33B139b12b1.pep
SKRMIVLVNELCSSLIYTERNIIYDLAKKTNFSPNIYCTGFLATNSDMALIILIGQCANVVAR

SEQ ID NO: 114086 - protein, 95 aa, Gossypium hirsutum
  Clone ID: uC-gsflnu33B139c03b1.pep
LFSVGIGADRIVCGGEEGVVRIWNFSEALEIEQRARALRGIRLENRMRRRRLQIEMNNKGGRTDQCSVAAKKKTVNGDRNSVWHSKRSISSKVKT

SEQ ID NO: 114087 - protein, 63 aa, Gossypium hirsutum
  Clone ID: uC-gsflnu33B139c04b1.pep
PGLPAALAPLADCITTRWPRADCNWIGGPARVEREPRLMDSYRSVPAAEKHSGTAMVGRQCVT

SEQ ID NO: 114088 - protein, 65 aa, Gossypium hirsutum
  Clone ID: uC-gsflnu33B139c06b1.pep
RVWLVLASAPGKSIVPLLCVQCRSIFRAPLALLMSFLLPMFPLWAQSAGCINPSLSNLRFSGRVS

SEQ ID NO: 114089 - protein, 70 aa, Gossypium hirsutum
  Clone ID: uC-gsflnu33B139c11b1.pep
WFACSCLWLALGSFRGMSIVPMWCDYCTNILRVPLVLVSAFWFPFFGLWVGSTGWSFKAPPFLGFAGRVT

SEQ ID NO: 114090 - protein, 104 aa, Gossypium hirsutum
  unsure (1)..(104): unsure at all Xaa locations
  Clone ID: uC-gsflnu33B139c12b1.pep
YYPCDKETDGGGFEDPRGGYTPPAQHSSQHGPRQPKSCQSNKATAQGRXKPNQNTGTSSQNRHKPAGANPARGQGSSKAYGSSPWKGYAQTAEMQSHIGDQKDP

SEQ ID NO: 114091 - protein, 102 aa, Gossypium hirsutum
  Clone ID: uC-gsflnu33B139d03b1.pep
NHSSISSIDCVAVRVPSYIYIFFWGGNGYHHSYNKVFFFFVSRTLMHYTSAPATVLPLRDRFLFLLFSPLPSSPLTSFPDARFRFSWLYFFLTESGFGRKSR

SEQ ID NO: 114092 - protein, 67 aa, Gossypium hirsutum
  Clone ID: uC-gsflnu33B139d07b1.pep
ISRVWLVLASLSEKSIVPLLCEECTNMLRAPLALYMSFLLSILHLWAKSTSYLKKPPPTERFTGRIS

SEQ ID NO: 114093 - protein, 60 aa, Gossypium hirsutum
  Clone ID: uC-gsflnu33B139d10b1.pep
FVSSAEMIARAYGWFSHLRRRSPILLYFGIHVGLLSVYSLLFLGPYSFRYGSFGLNPPFS

SEQ ID NO: 114094 - protein, 52 aa, Gossypium hirsutum
  unsure (1)..(52): unsure at all Xaa locations
  Clone ID: uC-gsflnu33B139e09b1.pep
PPLLCEQCSLIVRAPPALFMSLLLPILHLWVESTTYLKKTPPCVRFAGRKTX

SEQ ID NO: 114095 - protein, 67 aa, Gossypium hirsutum
  Clone ID: uC-gsflnu33B139e10b1.pep
TYKWLIQPKGRISEAIMTYKERAGHGQYGCINRTAEEDWTSPKQMREPNKRTRSQSCAGAKLAHRKG

SEQ ID NO: 114096 - protein, 78 aa, Gossypium hirsutum
  Clone ID: uC-gsflnu33B139e12b1.pep
TQGKGGFLMAILLMPLESSTSQAIRPLSAPSVQQRYSKIIATLGDECTCRERSGGECYSTRTQPCSQAYLKCLPGKLH

SEQ ID NO: 114097 - protein, 42 aa, Gossypium hirsutum
  Clone ID: uC-gsflnu33B139f03b1.pep
CSIWYIHTPRRLLQIPRSFGSLKKPIHPIKKTPMVSNVSPET

SEQ ID NO: 114098 - protein, 82 aa, Gossypium hirsutum
  Clone ID: uC-gsflnu33B139f12b1.pep
LPVRQTQRKGGLQTTKRGIPPKSTKPEAERTPTDLAVHRRKCKLIHTAEDERTSPKGRQGPTKSTRRQTCDAAEHRKRQGKQ

SEQ ID NO: 114099 - protein, 32 aa, Gossypium hirsutum
  Clone ID: uC-gsflnu33B139g04b1.pep
CIHHPKCLGLVCWRYDTFEKLIPSIKTPPLLS

SEQ ID NO: 114100 - protein, 45 aa, Gossypium hirsutum
  Clone ID: uC-gsflnu33B139g06b1.pep
AFNSSILCIPHPRCLGHACWRDDLFGINPPFIKTPPCVTNVSPDK

SEQ ID NO: 114101 - protein, 44 aa, Gossypium hirsutum
  Clone ID: uC-gsflnu33B139g08b1.pep
FNHIVHPQPALYMSLLLERSSLWVEPPTYINKTPPNLCFSGRVG

SEQ ID NO: 114102 - protein, 36 aa, Gossypium hirsutum
  Clone ID: uC-gsflnu33B139g10b1.pep
MAASNQRDDIASTNDIEREGGTWTISVHECHIRGEL

SEQ ID NO: 114103 - protein, 52 aa, Gossypium hirsutum
  Clone ID: uC-gsflnu33B139g11b1.pep
ILILLCYGFQLTLYSVSRPLRDGPLSRRYCTFGWKQPLVYSKPPPALAFPHE

SEQ ID NO: 114104 - protein, 62 aa, Gossypium hirsutum
  Clone ID: uC-gsflnu33B139g12b1.pep
KHALVRASYLRVVVQKLWANTGHANEIKGPSFVSSKLISYLHWYLPGSFTHNVLNINSIFYV

SEQ ID NO: 114105 - protein, 70 aa, Gossypium hirsutum
  Clone ID: uC-gsflnu33B139h03b1.pep
LEPSGEVCNRGSTKMPPWGRKRVRDQLRNRYLTDVNQVLRRPRMWIRGREPDSGLGIRLLAETKMLQGGA

SEQ ID NO: 114106 - protein, 36 aa, Gossypium hirsutum
  Clone ID: uC-gsflnu33B139h04b1.pep
PTCPVKRYLSKGFFLWMGWASQGYHLSNYQVLETSG

SEQ ID NO: 114107 - protein, 44 aa, Gossypium hirsutum
  Clone ID: uC-gsflnu33B139h05b1.pep
YASGQTLLIKGLFFIDGMSGPKVSSLQLSCPRDFGLCMHHMLAS

SEQ ID NO: 114108 - protein, 40 aa, Gossypium hirsutum
  Clone ID: uC-gsflnu33B139h06b1.pep
LLVRSNVGYIGACFYKWGVHPKGITPPTDHTYKARVRYAQ

SEQ ID NO: 114109 - protein, 87 aa, Gossypium hirsutum
  unsure (1)..(87): unsure at all Xaa locations
  Clone ID: uC-gsflnu33B139h09b1.pep
XCLLVRKTAGWGGFKSTKGLLPPKETISQAIATYQERTGAGQYACTNPIAEKNKKSPAQIRKASLRQTKNFCDSGKLAQGKGALQLT

SEQ ID NO: 114110 - protein, 148 aa, Gossypium hirsutum
  unsure (1)..(148): unsure at all Xaa locations
  Clone ID: uC-gsflnu33B140a09b1.pep
MASKRILKVLRELQRDPPTSCSAGPVAEDMFQWQATILGPGDSPYCGGVFIVNIHFPTDYPFKPPKVVFRTKVFHPNINSNGNICLDILKEQWSPALTISKVLLSICSLLTDPNADDPLVPEIAHIYKTDKVKYETIARSWTYXYAMG

SEQ ID NO: 114111 - protein, 86 aa, Gossypium hirsutum
  Clone ID: uC-gsflnu33B140a11b1.pep
VEDIPYCNNNTKYKGGGLFGGPRFPSRVLAGYSFFLGPPSLISWAGVFHSWVGKPLGFPHFNCLGEIPLFAGGGFWKGARPVRFSQ

SEQ ID NO: 114112 - protein, 115 aa, Gossypium hirsutum
  Clone ID: uC-gsflnu33B140b06b1.pep
IIDLICTLVFSIIVLGTTIRMLRNILEVLMESTPREIDATRLEKGLCEMDEVVAIHELHIWAITVGKVLLACHVLIKPEADADMVLNKVIDYIKRDYNISHVTIQIERQCESMAQ

SEQ ID NO: 114113 - protein, 56 aa, Gossypium hirsutum
  Clone ID: uC-gsflnu33B140b09b1.pep
HSTILSPQTIFVTTTKCHYLHCSKNVKLMMLSSKRKRQTWKVKFNIYLGHNIWVFV

SEQ ID NO: 114114 - protein, 76 aa, Gossypium hirsutum
  Clone ID: uC-gsflnu33B140c03b1.pep
ATFPETKTHRDGFNLQGIAVPKPAAEGLTPRKRNRDNDEEGGHSTHFLTLTEEKARIKTQQPRARTSPARATRPCR

SEQ ID NO: 114115 - protein, 151 aa, Gossypium hirsutum
  Clone ID: uC-gsflnu33B140c05b1.pep
MEWKIKRKRRMSTSISTKTEPKRQRLFTHCFLPMILLLSAAFFIGSAFIITDYKEKILGWGSAMVLQYSRSKMCETQCRAYGSEALPRGIISETSDLEMRPLWGAQNKKKPKLSMNLLAIAVGIKQKENVNKMVKMFPESDFCVMLFHYDG

SEQ ID NO: 114116 - protein, 46 aa, Gossypium hirsutum
  Clone ID: uC-gsflnu33B140d03b1.pep
MFFVPTFFVIFPVLCPTSISFNCPFNDRIPLLIEPVTDSFCFRKSG

SEQ ID NO: 114117 - protein, 52 aa, Gossypium hirsutum
  Clone ID: uC-gsflnu33B140d04b1.pep
CHFYGSNNCRGRFQLQAPIGVLSRQEVKYTLGKKHTETDGEGGYISLFQPQH

SEQ ID NO: 114118 - protein, 167 aa, Gossypium hirsutum
  Clone ID: uC-gsflnu33B140d06b1.pep
HNHQQQGTGGSENPQLPPPPTHVGAGGGTIAIRPSSMADRARLAKVPQPEAVLKCPRCDSTNTKVCYLNNYSLSQPRHFCKACRRYWTRGGALRNVPDGGGCRRNKKNKSSTSSKSPACTQKQAEVITGHNLPQQTPHLPFMASLQSFAQTGLGNIGLNYGGGGQAD

SEQ ID NO: 114119 - protein, 61 aa, Gossypium hirsutum
  unsure (1)..(61): unsure at all Xaa locations
  Clone ID: uC-gsflnu33B140d10b1.pep
QVRATCDCSDKSQCDMNGNSMDIGTEKSYVSTVAVAGGAKNEGKGXSGDSCSCANCTGGAH

SEQ ID NO: 114120 - protein, 74 aa, Gossypium hirsutum
  Clone ID: uC-gsflnu33B140e03b1.pep
LPSLTLTDSSLRKSLRFSFVLYVCQSLDMFFVPTVAVSLPVSCPRSISICFPFEDRFGLHIEPVTVSLGGRTRG

SEQ ID NO: 114121 - protein, 49 aa, Gossypium hirsutum
  Clone ID: uC-gsflnu33B140e04b1.pep
SLPMFFVPTVAVSLPVLCLTSISISFPFDDSSGLLIERATDSFCFRKSG

SEQ ID NO: 114122 - protein, 84 aa, Gossypium hirsutum
  Clone ID: uC-gsflnu33B140f06b1.pep
FLTMPHLSIVGTYPRQDLSYSELLPSTHGRPSTSSISTGFSCSHFASASPCITAAASLILIVSSTLGVLFINSRVIVLVFVDVE

SEQ ID NO: 114123 - protein, 112 aa, Gossypium hirsutum
  unsure (1)..(112): unsure at all Xaa locations
  Clone ID: uC-gsflnu33B140g12b1.pep
MWVESRIRCIIHNAECIQKIVREYGAFSSXMWGYMNHKRQSNKYKCPRKVPLRTPKAEAISKDLLKRGLRFVGPGIAYSFTPAGGLTIDHYIXCFRHKESGALAERPWRHTE

SEQ ID NO: 114124 - protein, 78 aa, Gossypium hirsutum
  Clone ID: uC-gsflnu33B140h03b1.pep
ACSHASVHIMLEPKGSRVEHLRPIAVPPTGLLYPYLIGGVPTYFRSLVTYTRGLWPMKVTHCGFFSGHVPLHTDAVFL

SEQ ID NO: 114125 - protein, 74 aa, Gossypium hirsutum
  Clone ID: uC-gsflnu33B141a01b1.pep
GVLQVLKHTWLGDHPPPSTNHSRKTHSLLVAGDILSGTEQKQTLLSRIPHLKRKRTSQIYQRARPRGAKSLKIH

SEQ ID NO: 114126 - protein, 56 aa, Gossypium hirsutum
  Clone ID: uC-gsflnu33B141a02b1.pep
GNDKVPNAYFNCCKVYDSNILIYSNQIPGNHILMKLGHDKDSNATLIWQYFNDQIE

SEQ ID NO: 114127 - protein, 70 aa, Gossypium hirsutum
  Clone ID: uC-gsflnu33B141c04b1.pep
GGPKKKDLTGPTGGGKLGPFKRAPLFWFFFFFGFFWFFMFFFFFFFFFFFFFFFFFFFFFFFFFFFFFFF

SEQ ID NO: 114128 - protein, 170 aa, Gossypium hirsutum
  Clone ID: uC-gsflnu33B141c11b1.pep
WRIENFSSIKDYMLCSESFTVDDSKWQLIIYPRGNNVGFLSIFLRVADSAALASGWTRYAHFGFAVIDQFDRENSKTIATKKEFNANYPIRGFGSFLPLTELRNPKRGYLLNDACLVEAYVFTGRTVDMISHEFIVKTDLDKRKTKEGDCFKAAIGNQKTTTTKPVEVIN

SEQ ID NO: 114129 - protein, 50 aa, Gossypium hirsutum
  Clone ID: uC-gsflnu33B141d04b1.pep
SVDALILHPPAKVKVISEMFLSLRRRPQGYLVIQILSITKGPQSIPKTLK

SEQ ID NO: 114130 - protein, 175 aa, Gossypium hirsutum
  Clone ID: uC-gsflnu33B141d12b1.pep
LPDAANLAVPAMRNVVSALKKVGLQDRIKVSTPLSFVVLSKSYPPSDGAFDGSHDNVLGPLLDFLEENQSPFMVNLYPFYAIGDSSLDAVLFKSPSSIFVDPNTGFSYKNIFDAQLDAGHFALAKRKSRSIPIIVTETGWPTRGSGRHRLAMASLDNDDDSYASIDNAQTYNTNL

SEQ ID NO: 114131 - protein, 85 aa, Gossypium hirsutum
  unsure (1)..(85): unsure at all Xaa locations
  Clone ID: uC-gsflnu33B141e12b1.pep
EELVLVDWVWEILIQCCFFKXTDIRLNGKYDXSEMSMVLKFCLTCXNDMPVTHSTMRQAVRYLDGEAQLPDRARSSSLFDSDKGN

SEQ ID NO: 114132 - protein, 53 aa, Gossypium hirsutum
  Clone ID: uC-gsflnu33B141g07b1.pep
PRVRPRVRLTGLPTVTNHSSTLPTFLLPSLTQILGSVFNLYLLNKCCIFLGIF

SEQ ID NO: 114133 - protein, 91 aa, Gossypium hirsutum
  Clone ID: uC-gsflnu33B141h09b1.pep
ATLPYEVWHGHDLSTLTREGGEQAAQYRPGVYYYDGNQASLGRETMEPNRNELIEEKHETETLPAKRSNRSVEYHQQYLEKGGGYWAKQSY

SEQ ID NO: 114134 - protein, 150 aa, Gossypium hirsutum
  Clone ID: uC-gsflnu33B142b01b1.pep
FYASEGFSMDGSDWVELFVREMLNASNIDDARARASRALEVFDKSIHARAGAEVAQNYHQENMMLKEQLETLIQENTILKRAVAVQHERQKEYENQSQELQHLKQVISQYQEQLRTLEVWLHSPEAYMHTMLLNYQLEWLLPDMCRYEHA

SEQ ID NO: 114135 - protein, 78 aa, Gossypium hirsutum
  Clone ID: uC-gsflnu33B142b10b1.pep
NWGEYCIRSKCITPPFVKKTLEEYPMSLLRKFSALGHFKFLFFETDIIHWFIICYINLPLFKITMLLLLSSQITFLYI

SEQ ID NO: 114136 - protein, 134 aa, Gossypium hirsutum
  Clone ID: uC-gsflnu33B142c05b1.pep
VCPLCKTELESSSHLLWTCAILQDIWDDLKVQTHPPVDSLEHKESFIRTFLAVDNSTKNLIAISLWSLWHCRNKVVHEGVIFSKQETLGFIRGYARELSFHTANFSSVVGPAVKEFWKPPNDGIIKINFDASFS

SEQ ID NO: 114137 - protein, 64 aa, Gossypium hirsutum
  Clone ID: uC-gsflnu33B142d04b1.pep
SRVRAHVRTGGGFRHCSFYLPDNQRRPLESQYNKLKSISGAQNQELRLVKRVPMYSTMRESIET

SEQ ID NO: 114138 - protein, 48 aa, Gossypium hirsutum
  Clone ID: uC-gsflnu33B142d05b1.pep
ALFRFPIHCYVLLPAVVPGPGLLEWSSTTYSRSLTIVFRCRADKIRFV

SEQ ID NO: 114139 - protein, 66 aa, Gossypium hirsutum
  Clone ID: uC-gsflnu33B142d06b1.pep
LVASHNRVARSHLILVNLLPCTALTQGMVALHLIQNHIHVVLPSIVPCSVLIESSSRMDSRSCTID

SEQ ID NO: 114140 - protein, 54 aa, Gossypium hirsutum
  Clone ID: uC-gsflnu33B142d07b1.pep
ATRTGTCTVGGFQLETHILTGRQPDTIVRDILYVVEELSITPEHGTTAGRRAYT

SEQ ID NO: 114141 - protein, 47 aa, Gossypium hirsutum
  Clone ID: uC-gsflnu33B142d08b1.pep
PRVRAQAQRGVFESKCILLQGDNEIRLCRTNYTSLKTLLQLLDMELP

SEQ ID NO: 114142 - protein, 55 aa, Gossypium hirsutum
  Clone ID: uC-gsflnu33B142e04b1.pep
KTLQPYRPNLVTVPEPLESSSTKNTLIQTIFFGCRPDPISSVNSHPPFESVPGRV

SEQ ID NO: 114143 - protein, 41 aa, Gossypium hirsutum
  Clone ID: uC-gsflnu33B142e05b1.pep
ILLLFSIRSSWFWPASMVFKYVFFVSTYLVSFSASSNMSSQ

SEQ ID NO: 114144 - protein, 61 aa, Gossypium hirsutum
  Clone ID: uC-gsflnu33B142e06b1.pep
STRPGTSTNTGQLLTTQLLTGRKRKTTGRGPVYVVEGHSTRPGPGTTDGKEQHYECEPGRA

SEQ ID NO: 114145 - protein, 54 aa, Gossypium hirsutum
  Clone ID: uC-gsflnu33B142e07b1.pep
VTRAGTTTKGGFQLGALIITGRKRKKIGQDILYIVEGHSTTQEPGTTDGEGQKH

SEQ ID NO: 114146 - protein, 53 aa, Gossypium hirsutum
  Clone ID: uC-gsflnu33B142e08b1.pep
CVSFFHHRFLVHVFPGGVHLCIVGPAVCFFVFPLFRYALSFNSPRACLCPYAC

SEQ ID NO: 114147 - protein, 63 aa, Gossypium hirsutum
  Clone ID: uC-gsflnu33B142f04b1.pep
TVRKPNMTARNKDFLLEDDPSASEAVPKFGTSTWNVLHTLEEQLTLLIPNNKFKNPKMRTLQM

SEQ ID NO: 114148 - protein, 33 aa, Gossypium hirsutum
  Clone ID: uC-gsflnu33B142f06b1.pep
GYSHSNYHVSFSISYNIRSQQPPPVLGCARTRD

SEQ ID NO: 114149 - protein, 59 aa, Gossypium hirsutum
  Clone ID: uC-gsflnu33B142f07b1.pep
IHIGYAGIQVGNSCPELKGLEHEMQPDGMMPSDTTVGVENEAFNTIFSETGSGKQVHRA

SEQ ID NO: 114150 - protein, 63 aa, Gossypium hirsutum
  Clone ID: uC-gsflnu33B142g05b1.pep
VPIHHSGIPYTGTSFPRTTALVLTATIALKDSNRDTPFAVAFSSSYDVSSSLTSSASEGPRTR

SEQ ID NO: 114151 - protein, 82 aa, Gossypium hirsutum
  unsure (1)..(82): unsure at all Xaa locations
  Clone ID: uC-gsflnu33B142g08b1.pep
LPRVRSCRDLMDIQKLMEENLVDVINIKLSKFGVLGILEIVEMVKKSGLELMIDSVAQTRLATGVAGHLAHGLXCFRYVNIC

SEQ ID NO: 114152 - protein, 115 aa, Gossypium hirsutum
  unsure (1)..(115): unsure at all Xaa locations
  Clone ID: uC-gsflnu33B143a03b1.pep
GQSLCLKRTDKTPRQSGSKGQGCDSRQRPPQQLYFVLHATLAPPCAVNLSLVLMDNPLLNLPVVICLFCLKQTKHTWQSFIAGCXIYLNIVFHNIKANSSSANYFISFGQPHRHS

SEQ ID NO: 114153 - protein, 60 aa, Gossypium hirsutum
  Clone ID: uC-gsflnu33B143a12b1.pep
VLLLSRLFFELFSVTTATDCACMNLAFHFRTKDLFVTLTETKGFTVSSRPNQGFHASYKE

SEQ ID NO: 114154 - protein, 109 aa, Gossypium hirsutum
  Clone ID: uC-gsflnu33B143b11b1.pep
KEREEKMEKQSKSYGVVLPTMDEDHEEFVFIDEDYDVDDDLSHWEFIDSSVTDSDDADDDVWFHRGESLRRNVIVAMPLTVPFTPITEVNKCIPIAAPIQDTVDRCLLL

SEQ ID NO: 114155 - protein, 35 aa, Gossypium hirsutum
  Clone ID: uC-gsflnu33B143c02b1.pep
KRLNISKFSLKYQRKIRGVMLHILYVRLHGELDHQ

SEQ ID NO: 114156 - protein, 129 aa, Gossypium hirsutum
  unsure (1)..(129): unsure at all Xaa locations
  Clone ID: uC-gsflnu33B143c04b1.pep
MGDDVDEPTLRITVVKLSAYLSGRNMPRIVTGTAVDTFDETAEEEAMLEAIMEGYRDCDGESLYKSVKPLGEAMAEAIKYGIIACRDELCITLKIWCTEAYTDVDLDAVKNALRMLQMEYXDLYLIHWP

SEQ ID NO: 114157 - protein, 41 aa, Gossypium hirsutum
  Clone ID: uC-gsflnu33B143c05b1.pep
SYCWFILVCVAWCQCGGSWCCTVLLFPLRSWASRSGVSFRF

SEQ ID NO: 114158 - protein, 128 aa, Gossypium hirsutum
  Clone ID: uC-gsflnu33B143d10b1.pep
RGKMPETRVEVPEMVMLEILSKLPVKSLTRFRCVCKPWCSSFQTPHFITKHHQNNLHNNNLNLLLKRCQGNTRDDIYYFSQLSIEKGQNFSAQHNIHLPFFEDCWYAPVVSGPCNGLLRLHDADKVAL

SEQ ID NO: 114159 - protein, 68 aa, Gossypium hirsutum
  Clone ID: uC-gsflnu33B143e02b1.pep
VTTRTAFSPSVAVQLHLQIGHNNDGASTARCRRCVRDVRRGESCCDIRGGEGEAAVGMCWIRLEATRV

SEQ ID NO: 114160 - protein, 54 aa, Gossypium hirsutum
  Clone ID: uC-gsflnu33B143e04b1.pep
FMNQPSTRPATWSCPSCRLIFTFATLPQSVTWPGHTTMWPLFYSFAQNFVNCSA

SEQ ID NO: 114161 - protein, 53 aa, Gossypium hirsutum
  Clone ID: uC-gsflnu33B143e08b1.pep
VSISQVILKLALIFISPSQSFFFSLVHLWIKCEDSQKRGIIHIHTALNISWPN

SEQ ID NO: 114162 - protein, 152 aa, Gossypium hirsutum
  unsure (1)..(152): unsure at all Xaa locations
  Clone ID: uC-gsflnu33B143e09b1.pep
VFSFALSEYEYQVAFSMFMHQYQKSYDHLEFAKRYNIFKSNLDFINAHNKANKTFTVGMNKFGDLSIKEFSKIYLGTRITKQVPAHVRKTSTRGLPASVDWRQKGAVTHVKNQGQCGSCWSFSTTGSVEGCHFLSTXKLCFLSEQNLVDCST

SEQ ID NO: 114163 - protein, 59 aa, Gossypium hirsutum
  Clone ID: uC-gsflnu33B143g05b1.pep
YLVSESSVLRMLCIACRGAIVHSIGVFSYSSNLLHLLGSFIHWGIVYEKLQFLYILALK

SEQ ID NO: 114164 - protein, 136 aa, Gossypium hirsutum
  Clone ID: uC-gsflnu33B143g10b1.pep
MLRQTTLVGLALGLASESSAQVSSDCESGWYQTEWPVYAPDCQQGGTASLDTTTAHSGRNSIRVDCAGGYCGHAFFGTNNIPSGDLYMQVWMNASNAIGDFHVTFMVLPDPDEGTNMHLLIGGMSNILLYNRESDD

SEQ ID NO: 114165 - protein, 155 aa, Gossypium hirsutum
  unsure (1)..(155): unsure at all Xaa locations
  Clone ID: uC-gsflnu33B143h07b1.pep
FTRPPTRPPNVKSFIASSVLVLFLAISFSFSRTNYYKIFNLKSSLASYHPTFLQSVFSFMLKTPKPNKSHWPNPISRPPHCVLWMAPFLSGGGYSSEAWSYVLALDEYMKSRENPSFKLGIHQHGDLESLEFWEGIAXNARDLAIELHRTDCRIN

SEQ ID NO: 114166 - protein, 126 aa, Gossypium hirsutum
  Clone ID: uC-gsflnu33B144a01b1.pep
MHSHSPTGDRKKNMEQPLTSRRTRKSQAKSELYSTFVIHSGSESDSDSGKSKPKPQPSRDPDLYATMVYKDVDEEGEDGSSIPPPFKCAPKLFGGGGGTPSDAEDGSGDAGDLGTMIGKRDHVREA

SEQ ID NO: 114167 - protein, 65 aa, Gossypium hirsutum
  unsure (1)..(65): unsure at all Xaa locations
  Clone ID: uC-gsflnu33B144a04b1.pep
HYVLDEIEEDPTGGKIKWEQGRLNGAPNKVEDIRXLHIVLVATCLHKAYMIPGGGACVLYGSVIP

SEQ ID NO: 114168 - protein, 59 aa, Gossypium hirsutum
  Clone ID: uC-gsflnu33B144b10b1.pep
IFSRLISAMQVKIHIQHSDGFPTMNQALNKLHVKWNNKFSNAICLAIDMLEQRLFQKHQ

SEQ ID NO: 114169 - protein, 162 aa, Gossypium hirsutum
  Clone ID: uC-gsflnu33B144d01b1.pep
PRVRPRVRPRVRVTIVDTSSSMESRIKLIDELKRADAVVLTYACDQPMTLSRLSSFWLPELRKLEIKAPVIVVGCKLDLRDERQPMNLEQVMAPIMQQFREIETCIECSSATLIQVPDVFYYAQKAVLHPTAPLFDQEKQTLEPRCIRAFERIFMLCDHDMD

SEQ ID NO: 114170 - protein, 57 aa, Gossypium hirsutum
  Clone ID: uC-gsflnu33B144d09b1.pep
SNRERAHEVYVRVKTEVEKCIAYLKEKREEDPYRNLMTRLVYQAMHGFKAPVPTFEL

SEQ ID NO: 114171 - protein, 152 aa, Gossypium hirsutum
  unsure (1)..(152): unsure at all Xaa locations
  Clone ID: uC-gsflnu33B144e08b1.pep
MCYVGKATKIFIFIVTALVVLGLVLGFGLLRHHKSHSHKCSGGDSCPSPNFFPNPISTPNSPPFSSSSSSYNPPPPAIGSNQPTSPNSPPTSIPTANPPPPAVQDPTSTPXSPDANPNPPPQSTPPPPSAVLSVPSYNQPTSVLVASGPVHA

SEQ ID NO: 114172 - protein, 76 aa, Gossypium hirsutum
  Clone ID: uC-gsflnu33B144h11b1.pep
PFAKTSYEYFLGKKHQNCPKPSRRLLHGSCNNNILHIMDVFTRQLNFPMNWKTKKKSRRNCLYIAAAINTGPLCKH

SEQ ID NO: 114173 - protein, 90 aa, Gossypium hirsutum
  Clone ID: uC-gsflnu33B145b01b1.pep
LRVGGRVGENTPTTKEGYYYRTIFEKFFPKNAARSTVPGGPSVACSTAKAVEWDAAWSENPDPSGRAALGVHASAYEAQKGGIAGKIAIA

SEQ ID NO: 114174 - protein, 68 aa, Gossypium hirsutum
  Clone ID: uC-gsflnu33B145b03b1.pep
FFYADGSWMEGVVYICITLHIYIYPYPFEPQFEMLNRIWRMSWVNCNLQWNWNVHLLVPCGTSWSVGW

SEQ ID NO: 114175 - protein, 78 aa, Gossypium hirsutum
  Clone ID: uC-gsflnu33B145b06b1.pep
TFQFFSQSSTPTIETHLSVLQTPFQLQKPATIPINYLLFTVLYTLLICIFSLFATGFMTNGDIHGFYGRPVKILSAVK

SEQ ID NO: 114176 - protein, 99 aa, Gossypium hirsutum
  unsure (1)..(99): unsure at all Xaa locations
  Clone ID: uC-gsflnu33B145c04b1.pep
MRYRGALKVAPLLLLLLILSTFANVKKTPHVTXLQIGVKHNPKLCKFQAHKGGRLKVHYRRQLTDGTVFDSRTERRDPIEYELGSGKGFKGWVLGQLGM

SEQ ID NO: 114177 - protein, 131 aa, Gossypium hirsutum
  Clone ID: uC-gsflnu33B145c05b1.pep
LKEWVDRNLQQEVWNPQANQEGYALSAVETLRIIDETLDAFFQLAIPAQTALLPDVIVGLDKCLQYYVIKAKSGCASRNTYIPTMPALTRCEIGSKFQGVWKKKEKSQNTQKRNSQVATMNGDKPFGIPQL

SEQ ID NO: 114178 - protein, 54 aa, Gossypium hirsutum
  Clone ID: uC-gsflnu33B145c09b1.pep
MQYMKKCWEMFTSMPYIKTQLKRVFIDIHPYQLEDVLHNWTTEEIPIVFRAYSE

SEQ ID NO: 114179 - protein, 46 aa, Gossypium hirsutum
  Clone ID: uC-gsflnu33B145d04b1.pep
HVTEKNIHKTQLITITNPSQAETSERSSVLSSNFFLFWDSNLLRLT

SEQ ID NO: 114180 - protein, 45 aa, Gossypium hirsutum
  Clone ID: uC-gsflnu33B145d05b1.pep
PCLDDPDIVLASEQHQAIKGTLQKLALPSNHHSVFFSVVRPIPLH

SEQ ID NO: 114181 - protein, 146 aa, Gossypium hirsutum
  Clone ID: uC-gsflnu33B145e04b1.pep
LSGYLGNDIANHHLSESLHLISIGTNDFLENYYPFPTRSSVYPVDKYEIFLIGIANNFIRELYNLGARKIAISGLPPMGCLPLERTTNIMHGSACIEEYNDVAKDFNQKLQDSVTELNRELGGIQLVMSNPYYKLLEMIQNPILFG

SEQ ID NO: 114182 - protein, 159 aa, Gossypium hirsutum
  Clone ID: uC-gsflnu33B145g05b1.pep
FNSLRKKQTEKMFSDDIIRFYAAELALALEYLHNLGIVYRDLKPENIMIQENGHLMLVDFDLSTKLSPMSPEKSIPPNSVRQTPPDSVKKKRVFPFVRCCNSGISPDDTASQESVNSERTTESESLEKSNSFRGTEEYVAPEIISGNGHDFAVDWWSLG

SEQ ID NO: 114183 - protein, 57 aa, Gossypium hirsutum
  Clone ID: uC-gsflnu33B145g11b1.pep
EIYHILSWRSFYLHSNGRIMILITHIFEFSYFTSILSHTAQLRLKDGPHKNIHNLSG

SEQ ID NO: 114184 - protein, 152 aa, Gossypium hirsutum
  unsure (1)..(152): unsure at all Xaa locations
  Clone ID: uC-gsflnu33B145h10b1.pep
TFTRPIASRLSQEKLEKLKKTTFGLRYGHVSLGTAMTRVKLAASLGASLVWLSGGLSLVQSLIKETLPSWFIXSHTPELDRGEPGGVVSMLRGYALAYFAVLCGTFAWGVDSVXPESRRRPKDLDSHLEFVASALDGKISLGCDYATWRAYV

SEQ ID NO: 114185 - protein, 51 aa, Gossypium hirsutum
  Clone ID: uC-gsflnu33B145h11b1.pep
WGAGASYYVGLPDFISLGDCLTSSLPVKSCGVTWIYLFGVNNYLGWWRYHE

SEQ ID NO: 114186 - protein, 58 aa, Gossypium hirsutum
  Clone ID: uC-gsflnu33B146b03b1.pep
PMFNQVISELKLHTPKFQDWILYLGSFEKIDSLCFLCLYTCVNFFKTCRVGWCILVDM

SEQ ID NO: 114187 - protein, 158 aa, Gossypium hirsutum
  Clone ID: uC-gsflnu33B146b10b1.pep
VLLNGSWVVIAGDSQARLFTLSLLNLILGPQSQRMDSVRADLFKRHSDYSVLVNETGMKLDFIWAPYVMNLTNLVMNFKTQKNCPDVMIMGAGLWHMLHFTNASDYDLHLHILKTQVVSLLPFSTELAMNEPVTGSVPIKSSHLFWLGMPVMINGMSN

SEQ ID NO: 114188 - protein, 122 aa, Gossypium hirsutum
  Clone ID: uC-gsflnu33B146c11b1.pep
FVLIVCLNWRHFCPPQKISEYCAYLWNLLQVRMLGSGRPFLLEIQNARQVPSEETVKEIESKINGLENKLVGVKNLQVVGSQGWTLMREGEAEKQKQYCALVWISCPLEDEDVCSILLLNDM

SEQ ID NO: 114189 - protein, 38 aa, Gossypium hirsutum
  Clone ID: uC-gsflnu33B146d03b1.pep
VFATLDMLLKTPQAQACAEDIAIWVKKYISTRGHEFSY

SEQ ID NO: 114190 - protein, 54 aa, Gossypium hirsutum
  Clone ID: uC-gsflnu33B146d05b1.pep
QIHIRFRSTKMEQSNKMKLKFSRANIYSFSSSVVGLTHDLSESEYKEMQWSLVC

SEQ ID NO: 114191 - protein, 123 aa, Gossypium hirsutum
  Clone ID: uC-gsflnu33B146d07b1.pep
ILDVSNLHLDSNYISNSIPSSLCHLTNSQSLQLERNLLHGSIPSSLLHLPNLLYLSVASNLLEGPIPLDIESLNALQYLDLSDNKLSGRIPLQIGGLSLYQLDLSHNILQGVKPFQFERFNSI

SEQ ID NO: 114192 - protein, 83 aa, Gossypium hirsutum
  Clone ID: uC-gsflnu33B146f05b1.pep
YKKKKKKKKKKGKIKKKKKKKPKKKKKSKIKKTHNFRGGPFRGSGFSSGGLRPFTFSLGAPNFYCRGPVFPPSGRGKPRGFPN

SEQ ID NO: 114193 - protein, 152 aa, Gossypium hirsutum
  Clone ID: uC-gsflnu33B146f06b1.pep
MQRFLSISSKSTSLKNQKQLHLPLVSSVSSATPKGQSCSHYFNQKSPSLGSRLGFDRVFSSGYFPNRVNLREHERNGNGFLRSKGLVGEIRNYSSETDRESIDYDVVIVGAGPAGLSAAIRFKQLCQEKNADFSVCVVEKGAEVGAHILSGN

SEQ ID NO: 114194 - protein, 62 aa, Gossypium hirsutum
  Clone ID: uC-gsflnu33B146f07b1.pep
YTLPYNVVYLYGKRLNVCCESKNLQILQSSSTEKFNQQRNEPVRGTKGVSFRVTGILKLQWQ

SEQ ID NO: 114195 - protein, 119 aa, Gossypium hirsutum
  unsure (1)..(119): unsure at all Xaa locations
  Clone ID: uC-gsflnu33B146g01b1.pep
LASGYYNDLTKVVYGKVTPATRQIDHDLXRTFPGHSRLDTPKGHAAFRRVLVGYSFRDSDVGYCQGLNYDAALLXLGMKTEEDAFWMLAVLLENVLVNDCYTNNLFGCHVEQRVLKICL

SEQ ID NO: 114196 - protein, 79 aa, Gossypium hirsutum
  Clone ID: uC-gsflnu33B146g07b1.pep
TKYLYYTPGLHLIYTWVVLLFNGTKYWFFLKIIFDWHIRKLLITRCLMMIQMIKEKVNKMDIFLMLSYFWNFNHLKLFL

SEQ ID NO: 114197 - protein, 50 aa, Gossypium hirsutum
  Clone ID: uC-gsflnu33B146g08b1.pep
MYLKDTWGKVGIQELISNLSIDREGKILVEDIFKLGGETDDADTAEAGRS

SEQ ID NO: 114198 - protein, 45 aa, Gossypium hirsutum
  Clone ID: uC-gsronu33B130d10b1.pep
LPRVRSILCLSLLLGWMINDFRPFNQSIELNVVGVIAVCMLVPFR

SEQ ID NO: 114199 - protein, 71 aa, Gossypium hirsutum
  Clone ID: uC-gsronu33B130f08b1.pep
CVSLLGLFLFLFFFFFLFFSHCQTVQAIINFFHISHWLYNGEKESKNKFPKSLTNPFVYSNKPGRVDGRVE

SEQ ID NO: 114200 - protein, 62 aa, Gossypium hirsutum
  Clone ID: uC-gsronu33B132a08b1.pep
APVIFVNEIPWVVEPIYLAQWGTMWIMMRREKRDRRHFKRMRFPPFDDEEPPLDYADNLLDV

SEQ ID NO: 114201 - protein, 65 aa, Gossypium hirsutum
  Clone ID: uC-gsronu33B132e12b1.pep
SNQPPKYRGMFGYITSAAKLTLNQRKTTYESKIQYNLSKVLAIECALLALVLPDPPLRLALIGAM

SEQ ID NO: 114202 - protein, 58 aa, Gossypium hirsutum
  Clone ID: uC-gsronu33B132h09b1.pep
VHASAHASAHASVDFGACLYLFVLSRYDFYVKNTQKRIKERTLSAYQELYFLEPFSKL

SEQ ID NO: 114203 - protein, 52 aa, Gossypium hirsutum
  Clone ID: uC-gsronu33B141b01b1.pep
DCFVELIKFEYPNALFNQLLLIVLFSYFVLELELEVESDHWVSAFNLCLSFL

SEQ ID NO: 114204 - protein, 59 aa, Gossypium hirsutum
  Clone ID: uC-gsronu33B141f11b1.pep
MSSAGGTLCLLNETDWLQSKIKCLCSSCYLEILFRQSGSSRLVYHATLLAYRFIFNLTL

SEQ ID NO: 114205 - protein, 80 aa, Gossypium hirsutum
  Clone ID: uC-gsronu33B141h10b1.pep
TFCDKLQWRLETKARTTIKSTTTNVKRNLPADSFLSLEEAATEVIYIYIYIYYTVDVYNLISHSLFELCWPFPALALYSI

SEQ ID NO: 114206 - protein, 56 aa, Gossypium hirsutum
  Clone ID: uC-gsronu33b023f12b1.pep
GAKKKYIVFRHKAFLMSSTAITPSSPRHSILFGKITFISYARFLLTRILKNKNNPT

SEQ ID NO: 114207 - protein, 52 aa, Gossypium hirsutum
  Clone ID: uC-gsronu33b025g05b1.pep
KYQKDVQEKRLFFHIYIYIYKHTCKKCCHYIVLEFQGQIISAASILYMKLAE

SEQ ID NO: 114208 - protein, 89 aa, Gossypium hirsutum
  Clone ID: uC-gsronu33b112h03b1.pep
PHASAHASAHASEEIKRTPFETFSFRFSDISFVFVVFNQSLFLPQKSPLTNWFRFGFITDYSRKKSLLFLSCCCYLSLFVVLFSCCLQV

SEQ ID NO: 114209 - protein, 50 aa, Gossypium hirsutum
  Clone ID: uC-gsflnu33B071a06b1.pep
IELVMYGRYDEQIDGFVYKMLDQFQNHYKKLDSGFLSKIPKGKFKLKKHD

SEQ ID NO: 114210 - protein, 37 aa, Gossypium hirsutum
  Clone ID: uC-gsflnu33B071b04b1.pep
YWTQCLNHQRPIFLAFKALFVFLLGGIGLCSKFHELR

SEQ ID NO: 114211 - protein, 84 aa, Gossypium hirsutum
  Clone ID: uC-gsflnu33B071c10b1.pep
AHASAHASGSIPSARGRGNPRSGFVSRGIQRKDTGSATQQSKVRAPAQAYVVRTYEEGDATDVIAAIDNPVSSKAKEKAKVTDE

SEQ ID NO: 114212 - protein, 41 aa, Gossypium hirsutum
  Clone ID: uC-gsflnu33B071d05b1.pep
FHASVSFYDWLGTLLLGCLSLHHSFFLSFFVISSFSWPKAE

SEQ ID NO: 114213 - protein, 75 aa, Gossypium hirsutum
  Clone ID: uC-gsronu33B051a05b1.pep
PHLIFQPRARKTRGRGKIKQQQPPTSKQTTTPAPRTPPKTPQADGKDRQGTHQGNRTPRENQSHQPERTTPGADG

SEQ ID NO: 114214 - protein, 69 aa, Gossypium hirsutum
  Clone ID: uC-gsronu33B081a03b1.pep
HQKKTLETPGPQNKYGSHKGSPPSQQDPESHLGSPRTDSHFLSLQLSIIYILLSIISLSYYTNAWTDAR

SEQ ID NO: 114215 - protein, 56 aa, Gossypium hirsutum
  Clone ID: uC-gsflmaxxa015a07b1.pep
WSCVPLSARSMGYRVYEIVIVTREKDRNFFDKEIGFYLKFFIGFLLLIHPSIDIKA

SEQ ID NO: 114216 - protein, 27 aa, Gossypium hirsutum
  Clone ID: uC-gsflmaxxa027a12b1.pep
FFISKGIMITLFYYSVILHIMINSYHD

SEQ ID NO: 114217 - protein, 73 aa, Gossypium hirsutum
  Clone ID: uC-gsflmaxxa045b01b1.pep
VPLGIIRPGLFLVQLRMIIGQVVIGRILQNNNRRLAQPQAGNIECDAGLQQHAKTGHLAATVPDLKDIVDHIV

SEQ ID NO: 114218 - protein, 45 aa, Gossypium hirsutum
  Clone ID: uC-gsflmaxxa045h03b1.pep
CVNAHYSAEERSGVNSGYSAVREAPIAAHIHSFCLSPGRSIVRLN

SEQ ID NO: 114219 - protein, 45 aa, Gossypium hirsutum
  Clone ID: uC-gsflmaxxa064d05b1.pep
RHVKMVMPTAMESYINLTSPITYKNNHFLYHYFNHFIKLIMLLLT

SEQ ID NO: 114220 - protein, 60 aa, Gossypium hirsutum
  unsure (1)..(60): unsure at all Xaa locations
  Clone ID: uC-gsflnu33B022f09b1.pep
LAVDIQRTDWKIPGPTXLNWLEIHLSLASWRDSKEARTDRPNKQARRLDGERHAACSGAL

SEQ ID NO: 114221 - protein, 38 aa, Gossypium hirsutum
  Clone ID: uC-gsflnu33B025g01b1.pep
QKLPPSHLTFRIAGPLSEHHRHKPTHHRHSEAQRPRPT

SEQ ID NO: 114222 - protein, 45 aa, Gossypium hirsutum
  Clone ID: uC-gsflnu33B058e06b1.pep
VSFPKKQTTITGGGYSKNDEDQNRRGTQIYVGLKKGLLRRKEAQS

SEQ ID NO: 114223 - protein, 36 aa, Gossypium hirsutum
  Clone ID: uC-gsflnu33B062b12b1.pep
LEASGAQRPPPILKLYIGRTVHPISSFIRPGFLLPF

SEQ ID NO: 114224 - protein, 35 aa, Gossypium hirsutum
  Clone ID: uC-gsflnu33B073b05b1.pep
PRDVICQVARKYNADALVYGKPCLLSYIEGIFIVV

SEQ ID NO: 114225 - protein, 134 aa, Gossypium hirsutum
  unsure (1)..(134): unsure at all Xaa locations
  Clone ID: uC-gsflnu33B095f09b1.pep
REEKKRKGENKKRKEIRGKENRKVKEXRRRERRKKKKKKRERRRREEESRREKNKMTEDGRGRDNKAGKDRERQGYPRPKQWKRRASEKEPKEHHRKAITGKHAKGHQDPLNRPPLFFLIKSSFFFFFFFFYIK

SEQ ID NO: 114226 - protein, 67 aa, Gossypium hirsutum
  Clone ID: uC-gsflnu33B095g07b1.pep
KNKAKHRTKTKEDEKTKPREAKRHPEIDTQGKYYKYMLAPAFLCIIKFITPPFSQTLPLFLSFLYQI

SEQ ID NO: 114227 - protein, 76 aa, Gossypium hirsutum
  unsure (1)..(76): unsure at all Xaa locations
  Clone ID: uC-gsflnu33B108d06b1.pep
GLLHCGALLVVSGHLTPDSLAVVLHLRAWEIPGVAHLCSLAVRPPFAGCRISEXARADRLSQLLPYLSGQWDGPCT

SEQ ID NO: 114228 - protein, 61 aa, Gossypium hirsutum
  Clone ID: uC-gsflnu33B134h05b1.pep
VTLPLSCPQFVVDLFLHQKHHWGACPALIPVPDRHIYLGNCRPLLNKNSPHDPACVGERVG

SEQ ID NO: 114229 - protein, 65 aa, Gossypium hirsutum
  Clone ID: uC-gsronu33B004h03b1.pep
KNIGFKVEKIIKNSLKLMGQKNLIFIKINIIEYLLDKFNSENILIWNKPMPNINLIFFLVYILKI

SEQ ID NO: 114230 - protein, 40 aa, Gossypium hirsutum
  Clone ID: uC-gsronu33B005g05b1.pep
SRVRGRVVRRGEFFNTLCGSRIHLWSGSLKRFRPLAPFAP

SEQ ID NO: 114231 - protein, 45 aa, Gossypium hirsutum
  Clone ID: uC-gsronu33B007g07b1.pep
IPDCKTLKSKSGVTYKISYRASKLIVCKWNVCPKTKQYNHSPQTI

SEQ ID NO: 114232 - protein, 78 aa, Gossypium hirsutum
  Clone ID: uC-gsronu33B009a01b1.pep
KKKKKRHNKKKDAFTHTQRGVPRFLAHARDLTTFLLFYSITYHRPPAAISHPVKLLNPHHFNIFAALSHYPPFAGLPF

SEQ ID NO: 114233 - protein, 41 aa, Gossypium hirsutum
  unsure (1)..(41): unsure at all Xaa locations
  Clone ID: uC-gsronu33B009h08b1.pep
LKKKTIXDPLEKKARVTHHQEXRTPYLRGGNDDCHLKSLSC

SEQ ID NO: 114234 - protein, 83 aa, Gossypium hirsutum
  Clone ID: uC-gsronu33B014e11b1.pep
GGPLLQIHNLKKKKGPVTSFFFISPPVSPRDWRHSRDSGRVLGFSLIKTLIYRGGENIVTTIDRPARFFLEGCSSHFNSSFEW

SEQ ID NO: 114235 - protein, 175 aa, Gossypium hirsutum
  unsure (1)..(175): unsure at all Xaa locations
  Clone ID: uC-gsronu33B029f03b1.pep
IYKNEYKEKKKEKKNKKNKKKKKIREINKKRXKENKXKYKKKEKNRYRLEKKKXEKNKNILKIRNKXKLKNKKIIKKXKEENKKIKESKKXIRNNKNXKKKKLKKKINKXKKYKIKKKNKRIKYIXKNENEIKKKKKKKKKKYIXKKIKKENKKNRKNNSIRENNKKIKKKLRII

SEQ ID NO: 114236 - protein, 67 aa, Gossypium hirsutum
  Clone ID: uC-gsronu33B044g07b1.pep
PILIPRFRIRFSNFPCIHCSIDHSLFTLKTLYGYEYDSVRRAIGPTYFQSPMGAHRTPRDVRCSSKH

SEQ ID NO: 114237 - protein, 79 aa, Gossypium hirsutum
  Clone ID: uC-gsronu33B060h07b1.pep
FVFFNAYGKSRGGFLLMVPLPFVSRVGLIKQRIWPVLSFKESCSPLPLRGIESSMSYFFTNEWTYCQVPPKVIAQIRLQ

SEQ ID NO: 114238 - protein, 64 aa, Gossypium hirsutum
  Clone ID: uC-gsronu33B062d04b1.pep
TSKHPSGGEILILARRGAVYRTSQRPSSCPHNPHGPFNFSPPGPKSPPKRATIHRNAIPMVFSH

SEQ ID NO: 114239 - protein, 82 aa, Gossypium hirsutum
  Clone ID: uC-gsronu33B079g03b1.pep
VVGMVVRCGAFRCCGGRLQGLVVLPVFVRLGQGFPASGFVSMWRVDWLWCPPCLCCGVVYPKMFFKRLQSGKVHHHAVALGR

SEQ ID NO: 114240 - protein, 33 aa, Gossypium hirsutum
  Clone ID: uC-gsronu33B086h04b1.pep
SNSRIYQRRIFGRFILQGSTVTKFHFHTHKISL

SEQ ID NO: 114241 - protein, 81 aa, Gossypium hirsutum
  Clone ID: uC-gsronu33B130a01b1.pep
LKRATPRVYHLHRCFQMDRSFYLDIGSTCFNKCILFNYHGHGITLVATVITICLVELMLKKFQIQQPLPANGFGLSNDKHL

SEQ ID NO: 114242 - protein, 80 aa, Gossypium hirsutum
  Clone ID: uC-gsronu33B130a12b1.pep
HVGFPSNVAVTEGFWFCIGPADTTNIRMQVPASNAGSFRVGDPSGAGKSVEACVRLTPRWVSFCISFCYFGIFFCSYFFF

SEQ ID NO: 114243 - protein, 78 aa, Gossypium hirsutum
  Clone ID: uC-gsronu33B130c08b1.pep
KLMLSADLRARRMVRCSEIREKLSSESNRGVNFYVDEIGGQLVLEPIIRELPALQQNSKSSNNLRRPALRALLGMCRS

SEQ ID NO: 114244 - protein, 67 aa, Gossypium hirsutum
  Clone ID: uC-gsronu33B130d05b1.pep
LAAHFRYQCLMVRLIPTGGRWSKGLFILSVIKWLVPSPQSSPVQQRCTAPQSACMRLGKPVHVFSNA

SEQ ID NO: 114245 - protein, 78 aa, Gossypium hirsutum
  unsure (1)..(78): unsure at all Xaa locations
  Clone ID: uC-gsronu33B130f11b1.pep
TKPDFCYCSSLPPLLVSTPSTVSLPTVSSPPPASPPPATSPPATSPPASATSATPPPAXSPSATPXXATPPPVLLVFL

SEQ ID NO: 114246 - protein, 50 aa, Gossypium hirsutum
  Clone ID: uC-gsronu33B130g08b1.pep
SICICKITCHLARLNSDLFISSTSSISIFVVILFILVFLFFREAKINILH

SEQ ID NO: 114247 - protein, 43 aa, Gossypium hirsutum
  Clone ID: uC-gsronu33B130h12b1.pep
NSPVLPKPPPYLRTLSYKSFLNLSRFYSEDMFLTTISAYTLTQ

SEQ ID NO: 114248 - protein, 67 aa, Gossypium hirsutum
  Clone ID: uC-gsronu33B132a09b1.pep
PMSYSLQKLLMPSPHIAIKNAIMGKHIVSIVLNRAYAEPMLPSSTLARRRSIILRHGPAHTDHAHSD

SEQ ID NO: 114249 - protein, 36 aa, Gossypium hirsutum
  Clone ID: uC-gsronu33B132b06b1.pep
VYACVVIELFAVDVPEGNTKDETCYFVEAIILCNIK

SEQ ID NO: 114250 - protein, 116 aa, Gossypium hirsutum
  Clone ID: uC-gsronu33B132d09b1.pep
VDAWVVVPAEIFPSRLRSTCHGISAAAGKAGAIVGAFGFLYAAQSTDPAKTDAGYPPGIGVRYSLIMLGVINFFGMLFTLLVPESKGKSLEELTGENGDENDEKQIQMDPSRTVPI

SEQ ID NO: 114251 - protein, 85 aa, Gossypium hirsutum
  Clone ID: uC-gsronu33B132g04b1.pep
VVVVVAAELVQVDMVVELLDMVVEVEKEAELVVHEQQEGYSTRLQPKILVTHSIIYKTECKQQVRPDRFATSNQKETQLARSALS

SEQ ID NO: 114252 - protein, 38 aa, Gossypium hirsutum
  Clone ID: uC-gsronu33B132g12b1.pep
VASQITRCGLRLGEPCVFKLSCNSWQGMHPRCDASDPL

SEQ ID NO: 114253 - protein, 45 aa, Gossypium hirsutum
  Clone ID: uC-gsronu33B132h02b1.pep
RQVNLSDPPLYVCHRMAWMVIFVFYIAIGLSFFFFFFFFFFFFFK

SEQ ID NO: 114254 - protein, 67 aa, Gossypium hirsutum
  Clone ID: uC-gsronu33B141b10b1.pep
IPRTNSKRQGPTGWENSITGRLWMWTASTTGTLLDDQDWLIEDHQLVLQTERPEPYAGNRGMSQHYV

SEQ ID NO: 114255 - protein, 105 aa, Gossypium hirsutum
  Clone ID: uC-gsronu33B141d09b1.pep
KKKKKKKKKKKKKKKKKKGKKYKKKKKKKHEKTKILFFYSYIYLNGGGLFFSQWGVPSLCRPFFFCWGTLYSLSGGGVIRMGPCHFFFYLLFFNCWWVSPFPSVG

SEQ ID NO: 114256 - protein, 51 aa, Gossypium hirsutum
  Clone ID: uC-gsronu33B141h02b1.pep
HASEKKKKKKGKKKNGGGYKRSKDYIGRPADCGTSLMAPPHAGLNVHIFSA

SEQ ID NO: 114257 - protein, 35 aa, Gossypium hirsutum
  Clone ID: uC-gsronu33B156d03b1.pep
SCIDPHSDLSLTPHITRTVRSAKFKNRTPLNYSHI

SEQ ID NO: 114258 - protein, 80 aa, Gossypium hirsutum
  Clone ID: uC-gsronu33b023a02b1.pep
RSTTRVVHSIQAEITEEISHRGIKKEIDPLKIVYLEGLHNLNAGILLVRRYCSQLSGLEWLKKYHHKLGFGYFRPALLRP

SEQ ID NO: 114259 - protein, 54 aa, Gossypium hirsutum
  Clone ID: uC-gsronu33b023a03b1.pep
PVASIQAPNMAHASCGEAKEKELCCCKREESSFLSVPHSLLKSPNESTTSTTKK

SEQ ID NO: 114260 - protein, 60 aa, Gossypium hirsutum
  Clone ID: uC-gsronu33b023b08b1.pep
WGFECNNSLTQFHTFTHKTSLIASYFLLGTASGCIFLTLSLLFTPFSMCVSSLSFSTPSP

SEQ ID NO: 114261 - protein, 59 aa, Gossypium hirsutum
  unsure (1)..(59): unsure at all Xaa locations
  Clone ID: uC-gsronu33b023c02b1.pep
IFLAISSASLTLPXITNWLVAPSKVKGESISFVGCLQLLVFCTFEACVGIXFWPSIMKM

SEQ ID NO: 114262 - protein, 87 aa, Gossypium hirsutum
  unsure (1)..(87): unsure at all Xaa locations
  Clone ID: uC-gsronu33b023c05b1.pep
SSCINSFVCRLYFILFLFFLFFSLFNFFFXFFGKFFAFFIDFFLSSYFFIVIFLLLFLFLXLFYYLILFNSLIFFFLPFCSIYYYFF

SEQ ID NO: 114263 - protein, 61 aa, Gossypium hirsutum
  Clone ID: uC-gsronu33b023d02b1.pep
FIFPEAIALGGACGISTARDRILAAAMNVLAVVTSTIAISSNIYSLITGNQSRRVYRLFFA

SEQ ID NO: 114264 - protein, 43 aa, Gossypium hirsutum
  Clone ID: uC-gsronu33b023d06b1.pep
YTCWLNIHIGVFLETSTGFYITDESTQPTLTLEYTLCEYALLN

SEQ ID NO: 114265 - protein, 78 aa, Gossypium hirsutum
  Clone ID: uC-gsronu33b023d08b1.pep
YYKGTIIFTILQKKLHKCSSLEYTHPFSLACLFPYLSFAYSNDCANLLTFLITRRRCRSIATEQVEEEKKENIFQCFI

SEQ ID NO: 114266 - protein, 84 aa, Gossypium hirsutum
  unsure (1)..(84): unsure at all Xaa locations
  Clone ID: uC-gsronu33b023d09b1.pep
FGHYTIGKDRGDLWWDRSQKLADNXTGLQGFLVYNAVGGGTGSGHGSLIXERLYVDYGKKSKHWIHCLSLNLRFSTSVXVEPYN

SEQ ID NO: 114267 - protein, 43 aa, Gossypium hirsutum
  Clone ID: uC-gsronu33b023e06b1.pep
HNSLNMSTTTDTLLKPFLLYPPFLKALPLTRSPTTTSFEVSPL

SEQ ID NO: 114268 - protein, 49 aa, Gossypium hirsutum
  Clone ID: uC-gsronu33b023f02b1.pep
GPSSETFVIMIVIRKRIGSIIVHRRIHHSNHHLNEIVSSIGASLVEELS

SEQ ID NO: 114269 - protein, 51 aa, Gossypium hirsutum
  Clone ID: uC-gsronu33b023h02b1.pep
GAPQLQPPDMNICLGVSAFEHHCILALSLTLFYLQLNSDFYYKFLLLLSYN

SEQ ID NO: 114270 - protein, 33 aa, Gossypium hirsutum
  Clone ID: uC-gsronu33b025a02b1.pep
RKTPPGRACNTINMELYSCYVVHIGQFKFAPLK

SEQ ID NO: 114271 - protein, 41 aa, Gossypium hirsutum
  Clone ID: uC-gsronu33b025d06b1.pep
MLPNGNSPLECGVESSKAQDISELAPPDPNGYIDLDINFLS

SEQ ID NO: 114272 - protein, 101 aa, Gossypium hirsutum
  Clone ID: uC-gsronu33b025d08b1.pep
ECYAECQTLQYSLRRTDLLFFFLTKASGRDIGRFLFVLLKAVGPVCASAASICFVEASRFSRPRAPSNSFKSFGLSMYILILVGSTYGKAETSPSSKIWAL

SEQ ID NO: 114273 - protein, 56 aa, Gossypium hirsutum
  Clone ID: uC-gsronu33b025f03b1.pep
GTGPFSRDFPRVLSILLCIFYPSGAFHIQRGLKIPSAALVEAFYSETDHDPTTEEF

SEQ ID NO: 114274 - protein, 75 aa, Gossypium hirsutum
  Clone ID: uC-gsronu33b025f09b1.pep
LCCKTWTNYLIIFLNLCICTVEFIKKKKKKKKKKKKGRKKKKDQGNKKKKKKKKNYRGGPPKGNKLTTVRQRRDR

SEQ ID NO: 114275 - protein, 52 aa, Gossypium hirsutum
  Clone ID: uC-gsronu33b025h03b1.pep
SPYYNVLNDKTLSLSNLISLQNIPLFTCGLLPNMPATITLSIIYPTKMVIGN

SEQ ID NO: 114276 - protein, 42 aa, Gossypium hirsutum
  Clone ID: uC-gsronu33b025h10b1.pep
SPQYKKPSTFHGYFQYSVFFMVHYCSLMLSAICAQRCHNATR

SEQ ID NO: 114277 - protein, 88 aa, Gossypium hirsutum
  Clone ID: uC-gsronu33b112a03b1.pep
YHTDKGPTQGYYHGGTRWGSQSTILAINLQNVYALTLTHAQRTYHMLRPTYCMWESYTIFNPDLWNPLQKRHIETLPKWSWQWLQNNT

SEQ ID NO: 114278 - protein, 179 aa, Gossypium hirsutum
  unsure (1)..(179): unsure at all Xaa locations
  Clone ID: uC-gsronu33b112a12b1.pep
MYTRTVIVVTPTYGPTFQALNFTGVMHFIMLVTYDVCWIAEDAGGNSSGTEFVFAKSGLKYFHAGFKXRLPNSWEERHILDSRFLFRAFRIFLEKNIFFLIFFFFLAFFFFLFFIFYFFLPFFHYLFFYFFIFSSYIFIFFLFSYNIVLNFLIYLFYSIFFLLLYYFISIFFLFFSFYF

SEQ ID NO: 114279 - protein, 102 aa, Gossypium hirsutum
  unsure (1)..(102): unsure at all Xaa locations
  Clone ID: uC-gsronu33b112b04b1.pep
MHEEKGHINLVAIDHVDSVKWTTTGHLIYRLGCMDKRVIDRMGKAAVETKQKGSRVSLELDKLQAERERGXTIDAXLWTIEXTEYYCTVFDAPGHRDCIKNM

SEQ ID NO: 114280 - protein, 110 aa, Gossypium hirsutum
  Clone ID: uC-gsronu33b112b10b1.pep
GGPIRQREAKFVKGAKGAAPRGSSTSGQRGMDPEDAKGGQQRGPPVRRNKQAGQSRRVGRPGKKEKAARARGEKRGTQRAAPLVFFFLLLYFFVFFLFFFFFFFFFFFFI

SEQ ID NO: 114281 - protein, 50 aa, Gossypium hirsutum
  unsure (1)..(50): unsure at all Xaa locations
  Clone ID: uC-gsronu33b112g02b1.pep
IAGMREKEXFFFFDALMSPCLAGFGGRSTPCFVSFVDARAWKGRALVPKS

SEQ ID NO: 114282 - protein, 42 aa, Gossypium hirsutum
  Clone ID: uC-gsronu33b112g04b1.pep
PPIYFFFNLFPFLFFFFFFFFFFFFFFFFFFFFFFFFFFFLK

SEQ ID NO: 114283 - protein, 71 aa, Gossypium hirsutum
  Clone ID: uC-gsronu33b112g07b1.pep
PTLPEHGVERPRIPAKYGDMSASSYALTPFNHPAITTPEEQSLLICNRALRSRWIQGLHHALIQESKLLYR

SEQ ID NO: 114284 - protein, 91 aa, Gossypium hirsutum
  Clone ID: uC-gsflmaxxa064c04b1.pep
GEESPSRHSEMEPPRMNFERLGFAFALLDPCCNEMPLLANESHPKGVTFNQIRLLMEIRLHKVLPIKLLHARAGLTRLAIRSTLEEDVANT

SEQ ID NO: 114285 - protein, 41 aa, Gossypium hirsutum
  Clone ID: uC-gsflmaxxa090a04b1.pep
PNNSLKHVQLKNVHCSKSFEVKDDYPTHKTYPCYVLNDRTY

SEQ ID NO: 114286 - protein, 39 aa, Gossypium hirsutum
  Clone ID: uC-gsflmaxxa090g07b1.pep
TVFIILDSTGQEEVFLLDPGAVTSQPHVRRRGQTHDRYP

SEQ ID NO: 114287 - protein, 47 aa, Gossypium hirsutum
  unsure (1)..(47): unsure at all Xaa locations
  Clone ID: uC-gsflmaxxa097c06b1.pep
MNHIQALSITTSTHHHGKXPFAIDHRTFARYTERTAFERPLTSGVAY

SEQ ID NO: 114288 - protein, 130 aa, Gossypium hirsutum
  Clone ID: uC-gsflnu33B037h12b1.pep
QKNQPQGKEGQTGTVKHRHRAPNTRKEEREATKRNYPDPKKETRRSHKHKQHDLGGHQKKEKGQKNPKPPTPETECLAQGQRNTTAQKAKNTLSQRTAQPKQGRAQTTNTLHPQNLREPTAKKKNATHPT

SEQ ID NO: 114289 - protein, 72 aa, Gossypium hirsutum
  Clone ID: uC-gsflnu33B071a07b1.pep
IYVSFLMSINSHAFDPCQRLCSLPFTAHRCQRSIALWSHPLNLGCFSDSFSPDKPLLILPLGLHIKIKVSTL

SEQ ID NO: 114290 - protein, 111 aa, Gossypium hirsutum
  Clone ID: uC-gsflnu33B071b07b1.pep
NVKLNKTGRGVGNFCDWKNLWRVRAYFAFVENGPFNQDGPVLIFFRAGCSSQPGARSLWRLGRILFWGFRGCGRGGLPFLFSVLFASLFGDGSFPFFPFLFGGVGGFFPGG

SEQ ID NO: 114291 - protein, 128 aa, Gossypium hirsutum
  unsure (1)..(128): unsure at all Xaa locations
  Clone ID: uC-gsflnu33B071b08b1.pep
SVVVGLTSSSRPALVYRSSRGSYQVVILRLPYAMSSHRPIKVVGYAVGGGHVLHXCDLTMAADNAIFGQTGPKDGYDVTAGCGRSILWPEQGCGNATPILYGTEGGNEGDRGCVEHRHSDQSKLSRRP

SEQ ID NO: 114292 - protein, 35 aa, Gossypium hirsutum
  Clone ID: uC-gsflnu33B071b12b1.pep
VAFRCLKSNSVFSNIIRRHGLTLYCIYYYNRQQRT

SEQ ID NO: 114293 - protein, 118 aa, Gossypium hirsutum
  Clone ID: uC-gsflnu33B071c07b1.pep
RAENSTVPKGKQAGPRVPKAPRAERKGLKAPGERGKTGKPPQAREDRAPPGLTGETPRAIKDIYGDTRDHLGPPQRGPPREGNPGPASPETLGSYKLAPPLFFFLFSPFFFFFFFFSA

SEQ ID NO: 114294 - protein, 83 aa, Gossypium hirsutum
  Clone ID: uC-gsflnu33B071h01b1.pep
PGSHTMGAYMQGLAGETRAVPNLKPCVCDCSFHAVLTLKGGPTVGLSQHWAKREGEGTAPSGGNYGGGGGGDLPLGTVKFAER

SEQ ID NO: 114295 - protein, 73 aa, Gossypium hirsutum
  Clone ID: uC-gsflnu33B101d12b1.pep
RHSYSFVIAKPNSMAVAVQRQDWERHDVTQLNLIGVDPHFASWSYSKKDQADRHCHQLHMLNGNGDGHCSCAL

SEQ ID NO: 114296 - protein, 57 aa, Gossypium hirsutum
  Clone ID: uC-gsflnu33B145a07b1.pep
KLLRLPVPNRKFRPHPRFRSRVRAGIKARGPTKGRPGFNGIRAQRNLDPRKGFTATP

SEQ ID NO: 114297 - protein, 51 aa, Gossypium hirsutum
  Clone ID: uC-gsronu33B167d12b1.pep
IWIVIRTVGMVRHPSLSLLSVVVLVLFRPDGARTLSIINSLLSFISPGMRQ

SEQ ID NO: 114298 - protein, 61 aa, Gossypium hirsutum
  Clone ID: uC-gsronu33b025g01b1.pep
FNYLLKLILFTLKRYSYLIFSPWRVCLNSNLTKILSSLSKLTQKYIQNFLFNSFLINLPFF

SEQ ID NO: 114299 - protein, 52 aa, Gossypium hirsutum
  unsure (1)..(52): unsure at all Xaa locations
  Clone ID: uC-gsronu33B132e10b1.pep
RFTYFIPGITAVNLCDNIHXPXRYTSITIVSVVTSRACLMMFDHVHLYRLQQ

SEQ ID NO: 114300 - protein, 86 aa, Gossypium hirsutum
  Clone ID: uC-gsronu33B132f05b1.pep
LPRPKKKKKKKKKKKKKKKKRKDDIKEGGFRMPAPGFLTLGWRALAFLYCHLDSMAWPGITRSWLAKPCRNPFHLSCVAFSFSRLV

SEQ ID NO: 114301 - protein, 31 aa, Gossypium hirsutum
  Clone ID: uC-gsronu33B019e12b1.pep
CLKTILFLINLLACYPSTFRSAAFGKNFRVL

SEQ ID NO: 114302 - protein, 89 aa, Gossypium hirsutum
  Clone ID: uC-gsronu33B050a10b1.pep
VILLELLTGRCAGDVIPGEEEGIGLIEWVRLKVAEGSGLSCFDSALAQEMGDLAAEKGMKEVLEIGLRCVRSLSERPGIKTIYEDLSSI

SEQ ID NO: 114303 - protein, 56 aa, Gossypium hirsutum
  Clone ID: uC-gsronu33B060c12b1.pep
CSEDYTPWARRSVANFGLDNGVVTFHPPLTEKTLCAIQTETGTCQILLPVINFLIL

SEQ ID NO: 114304 - protein, 65 aa, Gossypium hirsutum
  Clone ID: uC-gsronu33B111e06b1.pep
FMTRRNPSRPLLFDSEIESIAHRNRREIRRSLRYIDEEHEDDTTNTPQMAENPTPLLPPVVAANT

SEQ ID NO: 114305 - protein, 171 aa, Gossypium hirsutum
  unsure (1)..(171): unsure at all Xaa locations
  Clone ID: uC-gsronu33B145g06b1.pep
PFLSSSGKANYHLVCECFFMTARVLNLGLXKAFSDFKHLXQDISRSEDTLATLKAMQGQAPSPQLELDISRLEKEIELYSQEKFCYEAQILRDGALIRQALSFYRLMVVWLVDSAGGFKMPLPPTCPMEFASMPEHXVEDAMELLIFASRIPKALDGVVLDDLMNLIIMFM

SEQ ID NO: 114306 - protein, 86 aa, Gossypium hirsutum
  Clone ID: uC-gsflmaxxa090e01b1.pep
LPRSKQGFQSLFQKISIYAFIYLFLLTIMKIKEEIEAKSREETGLKITSWKLFLNSFLYSNFLYRFVCVSPSFYILSFGFIAENRK

SEQ ID NO: 114307 - protein, 57 aa, Gossypium hirsutum
  Clone ID: uC-gsflnu33B088d09b1.pep
ICRLLEVFKARSRDFRSEPLLGYTPYFLVTCWLSGGKRRMKLKKKKRKKSNVLTKND

SEQ ID NO: 114308 - protein, 70 aa, Gossypium hirsutum
  Clone ID: uC-gsflnu33B091d05b1.pep
MSDWGPVFVAVVLFILLTPGLLIQVPGKSRAIEFGNFQTSGVSILVHSIIYFALICILLLAIGIHMYVGS

SEQ ID NO: 114309 - protein, 79 aa, Gossypium hirsutum
  Clone ID: uC-gsflnu33B128d01b1.pep
FHASGDMAVYFGMLDALLASEQLPEEYRNRCQDILCNDCDKKGTAAFHWLYHKCGYCGSYNTRVIKVESANTICSTSNI

SEQ ID NO: 114310 - protein, 79 aa, Gossypium hirsutum
  Clone ID: uC-gsflnu33B132b03b1.pep
PVLDSNRKATNMERKSVRVCLDDMRPLIGHVQENGHPHILMMPCMFAVLLAGSWCLDEDMLEGSRVCLTRVETKEDVYF

SEQ ID NO: 114311 - protein, 54 aa, Gossypium hirsutum
  Clone ID: uC-gsflnu33B145e02b1.pep
FCFNNTDQSFKVGEAFGLENHHWEGENLRMGEWDLEGLMDNISSFPNFLDFQVE

SEQ ID NO: 114312 - protein, 55 aa, Gossypium hirsutum
  Clone ID: uC-gsronu33B051b05b1.pep
LCFSHTPKHQRCLVITYSLDGEPNNQHRPTICYRSIKPSDSETLERNHCDAFPTR

SEQ ID NO: 114313 - protein, 88 aa, Gossypium hirsutum
  Clone ID: uC-gsronu33B051c08b1.pep
GAALLMTPNPQCQLKKENALKREGEKPTKTASLKGYYLCKKICATISLTGGNTSNTICLGLDLYLSSDNKETVAALLRLQLARALLLR

SEQ ID NO: 114314 - protein, 114 aa, Gossypium hirsutum
  unsure (1)..(114): unsure at all Xaa locations
  Clone ID: uC-gsronu33B051c09b1.pep
PIPNLKEMTDVAGGQCGNQIGTHVRFKGLCLRKKLXPTGKYNAEGESXTPRVALDXNYYEIFRGRCLPCXDFIEVEPGSRGRMRLGPYGQSSMCANEPFGQTGALNNWAKGHYT

SEQ ID NO: 114315 - protein, 88 aa, Gossypium hirsutum
  unsure (1)..(88): unsure at all Xaa locations
  Clone ID: uC-gsronu33B051d09b1.pep
KPCGDPQLKRFGTHPFFERWXNRKGAHTYRSSKQLHTLKGXDTPCGAAHNARGVWGTRTVRPTLLRALXPRLLGFFLSFLGHFPGFPP

SEQ ID NO: 114316 - protein, 66 aa, Gossypium hirsutum
  Clone ID: uC-gsronu33B057a09b1.pep
GRPFFYFFYLFFFFFFFFFTTIRYIFLIFTNNCVQKFFIPKSFAFSLLGCISMACHKHSLSAFGFF

SEQ ID NO: 114317 - protein, 69 aa, Gossypium hirsutum
  Clone ID: uC-gsronu33B057a12b1.pep
SGSRGQNMHRAGGTETKLAEVADKEGKTFCVTRIEVGLDAVALREAVSLVIQQKGMPVMDFSIDENHKQ

SEQ ID NO: 114318 - protein, 65 aa, Gossypium hirsutum
  Clone ID: uC-gsronu33B057b09b1.pep
KPIKLLKKRKQQKKQASGMKYSQGRKPARTKKKSKTGDWRKKTKFVGKIMDKPNGWEQMNIFLKE

SEQ ID NO: 114319 - protein, 53 aa, Gossypium hirsutum
  Clone ID: uC-gsronu33B057b11b1.pep
IGPILGGVLIPKWALKESADTVKTDCRGNIHLTLFSFAVSERKIHDLQPSFIN

SEQ ID NO: 114320 - protein, 103 aa, Gossypium hirsutum
  Clone ID: uC-gsronu33B057d07b1.pep
GGLSVGFVGSQGMLGIGGSPVVYVVVSGGISPGLENYGRFGVVRLCLDGFFCVRVFLLKVSCCFPNIYACKFQCFLECYCIAFSAVLFCSSLSLLMKQMFRKS

SEQ ID NO: 114321 - protein, 92 aa, Gossypium hirsutum
  Clone ID: uC-gsronu33B057e04b1.pep
FALGKISHCVCGGFFDTGQFVYHIDLNDLLEIFVLFGHPKAFSSSFFSACAVSTFSRFKYHLPNINAQYSLSKKIDFGSHCFYDTASLFPIL

SEQ ID NO: 114322 - protein, 49 aa, Gossypium hirsutum
  Clone ID: uC-gsronu33B057g05b1.pep
ACMRSLACFLSFDRPSHILLIFLFPICVFILLIKHYLFLYVFLCIFFIF

SEQ ID NO: 114323 - protein, 61 aa, Gossypium hirsutum
  Clone ID: uC-gsronu33B057g11b1.pep
AVNPIAWIIRREKWAYSQKEAAGSTPLPPAKAFQGLCWRYSRTYMPKAAPHTVKSIEAIEG

SEQ ID NO: 114324 - protein, 70 aa, Gossypium hirsutum
  Clone ID: uC-gsronu33B057h04b1.pep
SSNIEYSCQNENEITGAHSCSDCNGSSNYDTYTDGNTLINADPFSSNHEVKEGETGLGTLPGATSEGNKS

SEQ ID NO: 114325 - protein, 47 aa, Gossypium hirsutum
  Clone ID: uC-gsronu33B057h05b1.pep
HFIQGHLSVQFGVHFVLTWSSQYTFSHNPKTNIWNQPDILSLTHPRT

SEQ ID NO: 114326 - protein, 99 aa, Gossypium hirsutum
  Clone ID: uC-gsronu33B060a05b1.pep
TRVAVACPNALNMMWLWGNSAFPFSREKEDSFWTAEAWTLELLVDRLEPNLSTWASQQKVAWFYGGVQMEWIVSFATRTNGVAMALDIGIEMVYAGKNN

SEQ ID NO: 114327 - protein, 60 aa, Gossypium hirsutum
  Clone ID: uC-gsronu33B060b02b1.pep
KAVACYQPATQGQVITCRAARAYEPHKPLHIEDVQAAAAQAGEDCGKILCPALWHTDAYS

SEQ ID NO: 114328 - protein, 72 aa, Gossypium hirsutum
  Clone ID: uC-gsronu33B060b05b1.pep
QEHQHQVHGSPRAPCHTRSPPFRSESKATYRSLTEDEYILWLICKWLYQTVIHNMISGFGKWVSSSSLIACR

SEQ ID NO: 114329 - protein, 54 aa, Gossypium hirsutum
  Clone ID: uC-gsronu33B060b06b1.pep
HVVVSYLHSASDSSWLILHYIPEESVLIICIGAFSLCVAHPNGLVSAGYYSYAS

SEQ ID NO: 114330 - protein, 71 aa, Gossypium hirsutum
  Clone ID: uC-gsronu33B060b09b1.pep
LSIGNVLAHTWICAIPLSCVSSRHMQPILLCSSAAVSSSMLPNINVQKSHACVCKLAPCRAMAQLYHMPIG

SEQ ID NO: 114331 - protein, 38 aa, Gossypium hirsutum
  Clone ID: uC-gsronu33B060b10b1.pep
ATKALHRKIIWIYSRGTWHINGKFEHITKELIVKTLTC

SEQ ID NO: 114332 - protein, 63 aa, Gossypium hirsutum
  Clone ID: uC-gsronu33B060b12b1.pep
LQLWSRGRGSKKPPRGTTYLSVFIYVEGRCVSEASNHWLYPIGLVKGSTYPECPCGGNTLLDG

SEQ ID NO: 114333 - protein, 58 aa, Gossypium hirsutum
  Clone ID: uC-gsronu33B060d04b1.pep
RFYRVNQIDVRGPYYTTNRLVKHCLNPNQITLGDRPLYAAGLIAQGPHPIVLSTRGSF

SEQ ID NO: 114334 - protein, 114 aa, Gossypium hirsutum
  Clone ID: uC-gsronu33B060d09b1.pep
KKQITIIHRSYLLLFRFFPTFSLLLYNFYLGPAVLAGPVFSSPSCPPCVFFLGPPDSISWAAVFQCWLGKTRACPHFFGLSFIPFFSGGVIGLGAPPFGFFQWCPFLYGGGPPP

SEQ ID NO: 114335 - protein, 104 aa, Gossypium hirsutum
  unsure (1)..(104): unsure at all Xaa locations
  Clone ID: uC-gsronu33B060e02b1.pep
PRFRATNVNDEXGFDPKIQENKEGLELLNTAIAXAGFPAKGDIVMEVAALEWAGAYGTHDLYFXGENNDVLQGIPGDALRDGFLTRLAGYTLGLNQDPFDQDAC

SEQ ID NO: 114336 - protein, 59 aa, Gossypium hirsutum
  Clone ID: uC-gsronu33B060e03b1.pep
KSNQTLSKISNFFLFYLGSQGLRDKASPPLGLKSMTLVSTSPDLVEIDSYATLVLNEVC

SEQ ID NO: 114337 - protein, 51 aa, Gossypium hirsutum
  Clone ID: uC-gsronu33B060e11b1.pep
CGSNILPFLLKYFCLSMIICYPVRALYILLVPGDMISVTALGSATCTVVSP

SEQ ID NO: 114338 - protein, 55 aa, Gossypium hirsutum
  Clone ID: uC-gsronu33B060f03b1.pep
GASPIKLHNEIIFPKKSRHNVIKQLQLTPLSNGFCFSLLMVLKSIYLSLVYLKIT

SEQ ID NO: 114339 - protein, 52 aa, Gossypium hirsutum
  Clone ID: uC-gsronu33B060f07b1.pep
NSSIGMLRGGFIFDFRAFLIKKRDAKRVVESFKEASPNCGAHVDRKAPRLQR

SEQ ID NO: 114340 - protein, 119 aa, Gossypium hirsutum
  unsure (1)..(119): unsure at all Xaa locations
  Clone ID: uC-gsronu33B060f09b1.pep
RKPPPAVSARSRNIHQADLGRLEIDSVELVMPGLMACRAEVGPVQPLMGAKITGSYYMTXIQTDDLIETLTALGAAARRSYCYILSTQDHAAAPFCPGLXALLTWRGETLQEYWWTTEE

SEQ ID NO: 114341 - protein, 55 aa, Gossypium hirsutum
  Clone ID: uC-gsronu33B060g05b1.pep
ARPFYGVAGSIMDDQLIYVIAYIYIYINVTMVLVTLENKVCVSILCWDDAQGAEP

SEQ ID NO: 114342 - protein, 98 aa, Gossypium hirsutum
  unsure (1)..(98): unsure at all Xaa locations
  Clone ID: uC-gsronu33B060g06b1.pep
ALLADATKRSTLVKLVEQVERXEEMVKIMRNVRWVGPVDDELXVWERNLIYGAYTNDIGARRASGRIXCCIEHKEEGPDCADHVFVIRDYRAKNEAEV

SEQ ID NO: 114343 - protein, 156 aa, Gossypium hirsutum
  unsure (1)..(156): unsure at all Xaa locations
  Clone ID: uC-gsronu33B060h05b1.pep
ALSKSDLVYARGHIYQLSNSLTRKKLIMRWMMVADYECNQSLDDVFLYRSILCRRVADIDELSSVGGEEDSFWLLKMGVPYLNEFLIKLMALFCWGNPATTIEGWQYYLFVLATCGXSITHLKTXLNWGFLGVFIVPKVCSVYSPCNCSGKFEFTF

SEQ ID NO: 114344 - protein, 67 aa, Gossypium hirsutum
  Clone ID: uC-gsronu33B060h06b1.pep
MARKMLDDGNLNHTNYEAAEYEYHLFVIHAGSGGVRAARFSANHGAPVGMCELPFYPNSSEVSGRVG

SEQ ID NO: 114345 - protein, 45 aa, Gossypium hirsutum
  Clone ID: uC-gsronu33B072a11b1.pep
LTSPPKKFLFSVSLELYTHSSTFTLSKLLCLCSSYPNSSIFYFIN

SEQ ID NO: 114346 - protein, 34 aa, Gossypium hirsutum
  Clone ID: uC-gsronu33B072b07b1.pep
VQPYSGSPANLVAFTAVLQPHDRTMGLDLPLGGH

SEQ ID NO: 114347 - protein, 30 aa, Gossypium hirsutum
  Clone ID: uC-gsronu33B072e09b1.pep
CYMLTILSAFILGKRGDSTILLPSKFCISQ

SEQ ID NO: 114348 - protein, 32 aa, Gossypium hirsutum
  Clone ID: uC-gsronu33B072f01b1.pep
SLVRSNMKGIKLLGDLGFTNDIITIIEGSNYC

SEQ ID NO: 114349 - protein, 42 aa, Gossypium hirsutum
  Clone ID: uC-gsronu33B072f06b1.pep
DRNCRPDPRHRSLDSARVQKSRIGLTQSIQGTETRRLRGDQK

SEQ ID NO: 114350 - protein, 45 aa, Gossypium hirsutum
  Clone ID: uC-gsronu33B072h10b1.pep
KRGEGSLVFFKLPFSKPHLKNLSSILSPSYNSYNISLINHQPPFI

SEQ ID NO: 114351 - protein, 108 aa, Gossypium hirsutum
  unsure (1)..(108): unsure at all Xaa locations
  Clone ID: uC-gsronu33B074h02b1.pep
ILYINSFFLGLYSNILFSFFLVFLYNFLIYSFNLMILSHIFSLFHFFFIFFFILYSFYITFFLSLFILIFLLFLFYSLFFFXFILYFLYYYFSIFTLYYYFFFLFFFF

SEQ ID NO: 114352 - protein, 30 aa, Gossypium hirsutum
  Clone ID: uC-gsronu33B081b10b1.pep
NKVYLFIILSPLDQKILSSLAFPHTDRTND

SEQ ID NO: 114353 - protein, 38 aa, Gossypium hirsutum
  Clone ID: uC-gsronu33B081e06b1.pep
WHLTTLLERQDQLFKIVSPLEQEITSTLVLPPIHRKRS

SEQ ID NO: 114354 - protein, 48 aa, Gossypium hirsutum
  Clone ID: uC-gsronu33B081e09b1.pep
IFKRTGIVPQSGYSFQIEWSHIFIHRQAQLIAIGTVCIQQTTDLRDEV

SEQ ID NO: 114355 - protein, 45 aa, Gossypium hirsutum
  Clone ID: uC-gsronu33B081e10b1.pep
RQVSCPQIVHRSPARIVYVTEQSPICAPETRVIGHHPPVEVSSSG

SEQ ID NO: 114356 - protein, 49 aa, Gossypium hirsutum
  Clone ID: uC-gsronu33B081f06b1.pep
LQRVFLLSHRPLPSYIALLAIPKPCLVAFSYTTRFSFLAFLLDYSPQNG

SEQ ID NO: 114357 - protein, 28 aa, Gossypium hirsutum
  Clone ID: uC-gsronu33B081f07b1.pep
SCVRSIVRQTNVNLVSRSKVSLITNPSF

SEQ ID NO: 114358 - protein, 26 aa, Gossypium hirsutum
  Clone ID: uC-gsronu33B081f09b1.pep
EYKSFYDIKFIYFSFRVPLTEGSSLL

SEQ ID NO: 114359 - protein, 108 aa, Gossypium hirsutum
  Clone ID: uC-gsronu33B081g04b1.pep
TPWRTVPRVSSKHPVATSRVTTLWGRRIAPYWGGAYYGTARVPPGVSQLNPFVIPPLTPSWGPSRIAPFRGASPRLPHPDWRTVPPLFRPINRGGWALPWPLYHFGCP

SEQ ID NO: 114360 - protein, 77 aa, Gossypium hirsutum
  Clone ID: uC-gsronu33B081g08b1.pep
SIGPLDVRMRCIILYPSCDAFHNCHCTYLSQCTKIVYTIPMILATYMRYINNAEMDAPAEIYVTSIALCLQLHRLHP

SEQ ID NO: 114361 - protein, 35 aa, Gossypium hirsutum
  Clone ID: uC-gsronu33B081g09b1.pep
EYKSIMFKIGSSDQIESLCPKVLSYCSLLLQRSNP

SEQ ID NO: 114362 - protein, 68 aa, Gossypium hirsutum
  Clone ID: uC-gsronu33B082a12b1.pep
KVGHRGVLKREGIAERGLYIPRRVPHRGMNTEPTLLCVGRITLTECASILIIKALLRLVCLLLLISWP

SEQ ID NO: 114363 - protein, 156 aa, Gossypium hirsutum
  unsure (1)..(156): unsure at all Xaa locations
  Clone ID: uC-gsronu33B082g03b1.pep
GGKAPTGPKGGPEGTTGGNQDGAGEKGDTKKKRRGKPKNRKEKEGEPPPPPGRKGPERGPAQAPRGGAPGGGEAPRPGPVQNPKRRRKGGHPPPXRGQTPGAPPPKRGKPPPPERIPAARQKPRPPPENPGQMSKNARARQKGMSSQESSTEAPPL

SEQ ID NO: 114364 - protein, 40 aa, Gossypium hirsutum
  Clone ID: uC-gsronu33B082g07b1.pep
VGQPNLVSPVLFSAVIIVLIICLLYLYLFQSRSSNLSYRA

SEQ ID NO: 114365 - protein, 87 aa, Gossypium hirsutum
  Clone ID: uC-gsronu33B086d02b1.pep
GSVDSMFYSLYSHFIHLLLFYILIIFFSFSYSLYFFSFLNFFFLCIFIFHFLFYFIIIFFFISSSIYHLFYFLFLLFILFNLSHIYL

SEQ ID NO: 114366 - protein, 53 aa, Gossypium hirsutum
  unsure (1)..(53): unsure at all Xaa locations
  Clone ID: uC-gsronu33B086g11b1.pep
SYRPQKSRVEQKAHSSFAPRSKXHYHTFKFFLLYNYLPSFPPFPTTFYLTLLP

SEQ ID NO: 114367 - protein, 158 aa, Gossypium hirsutum
  unsure (1)..(158): unsure at all Xaa locations
  Clone ID: uC-gsronu33B099b10b1.pep
EKGQKRGAKRPKKGKRHPGEKPPPPPPKKGPPKGGEPPPKGGGAHGQKGQPEXAPRRKNQTPKRGMPPRAKKGGNPRGKPGNPRGKPRPGGGKKGPPKKKTEAPTRGPKPGTPQKGAPNSTKVRSNYFYFFFFFYLVIFFFLFFISFLVSIIFYMLWA

SEQ ID NO: 114368 - protein, 74 aa, Gossypium hirsutum
  unsure (1)..(74): unsure at all Xaa locations
  Clone ID: uC-gsronu33B099d12b1.pep
VXQIKKKKKXKKKKKKRGSGLGAPISAREGGALYCSRVTSIISPARFFQGGLGITLWGPPFLALWRVSLLRPLA

SEQ ID NO: 114369 - protein, 84 aa, Gossypium hirsutum
  Clone ID: uC-gsronu33B099g05b1.pep
PLVLPRVRKNSVGYNPSSRFEDVGKRKGRHGTGQGRLYDFYWLLAILCCLNLAIYLVFAKWYVYKDKRLADEGIELEESEPTFH

SEQ ID NO: 114370 - protein, 42 aa, Gossypium hirsutum
  Clone ID: uC-gsronu33B100a01b1.pep
NLKTNFFASVYSCSDANLFVIRLGCSLTISGLLERKLDSVTE

SEQ ID NO: 114371 - protein, 51 aa, Gossypium hirsutum
  Clone ID: uC-gsronu33B100a10b1.pep
KEKKRIWVKEYQKFIIDHQFGSRKRRENVPKEQISKRNDSNSKMKAFYIDR

SEQ ID NO: 114372 - protein, 37 aa, Gossypium hirsutum
  Clone ID: uC-gsronu33B100b09b1.pep
FGDSTLSSVFDGRPVHIIGEINALLNTGVSAHVLTYI

SEQ ID NO: 114373 - protein, 48 aa, Gossypium hirsutum
  Clone ID: uC-gsronu33B100g07b1.pep
ISRARFSKEKHSMSSICSSYIYMTSLSKSPDAWVRPVNSDTGAMQALA

SEQ ID NO: 114374 - protein, 35 aa, Gossypium hirsutum
  Clone ID: uC-gsronu33B100h01b1.pep
RYEKIQDLSLFVMHLGELLIPTQTRSSNHKMRKEG

SEQ ID NO: 114375 - protein, 68 aa, Gossypium hirsutum
  Clone ID: uC-gsronu33B100h09b1.pep
RSRGLTLGTCISMAIPSFFVSFTKILVGFCLLCMVHKDFVVAGFEEVRFAHDTCDPSTIGAFTAARNC

SEQ ID NO: 114376 - protein, 84 aa, Gossypium hirsutum
  Clone ID: uC-gsronu33B101c04b1.pep
YFFVCQTLHFPKIVPDVKVKAVIGYGIYCTLLFLLIYFKRFLFVLFPLLSPSFYHLHYFAHLCNIKSFFFFFQLIKHFSFPISF

SEQ ID NO: 114377 - protein, 57 aa, Gossypium hirsutum
  Clone ID: uC-gsronu33B101e06b1.pep
PFVRPRVRLNSAMAAQLVWTPIDVVSQKTYGSKVYNNSNSCMNAISNVLSCLYKNGL

SEQ ID NO: 114378 - protein, 83 aa, Gossypium hirsutum
  Clone ID: uC-gsronu33B103d06b1.pep
MSNRTLWSEVKGLVLEAKSVVKIPSFQIIVAQGVTGSFPWSALSFAPMWLELIGFSHKKTAFLIAMFVIATSAGGLFGGRMGD

SEQ ID NO: 114379 - protein, 38 aa, Gossypium hirsutum
  Clone ID: uC-gsronu33B103g02b1.pep
VVFHLISYLSESRVAIHCSLFNLSFATMCDRSSFPYAW

SEQ ID NO: 114380 - protein, 57 aa, Gossypium hirsutum
  Clone ID: uC-gsronu33B124c07b1.pep
HLAVFFVILSLFSNSSVLQVSNCLCLNFWQNFINGNSTCQMLLYLQVFINNTMFLHN

SEQ ID NO: 114381 - protein, 113 aa, Gossypium hirsutum
  Clone ID: uC-gsronu33B124e11b1.pep
KKKKKKKKRRIYKKKKEKLKKKKNNKKGKQLIKISVGSSYFFGVAVLGLPIFVLLSLGVLIFFGWPLIYIVWGGFFPGWAGLNRPLCPPLFAFCGLFNGSSGWKEALFGAVSP

SEQ ID NO: 114382 - protein, 124 aa, Gossypium hirsutum
  unsure (1)..(124): unsure at all Xaa locations
  Clone ID: uC-gsronu33B124f01b1.pep
EQQTTQKTTWERYEKLYVILTPDCETCVSIRPIFNIVHQTIRYIFDLYHSLEELYNALYEFCLDPGYAARTLIAXCNKPGSERPCCLRCMLPLYHYSATSCAXRVPTFLPAHLVIACVHCGFMA

SEQ ID NO: 114383 - protein, 61 aa, Gossypium hirsutum
  Clone ID: uC-gsronu33B125b01b1.pep
CVDSIDLSPCLMRSLYSLKEQGKTSLSSQESLKRSIARIQPQHHESYHQQESKEKTGLLGG

SEQ ID NO: 114384 - protein, 58 aa, Gossypium hirsutum
  Clone ID: uC-gsronu33B125b12b1.pep
WLNTATASCQTIRQKDSRTSALVYGTLTDGSYALKLMLRPRTRKKTGGSTKNGQRPKP

SEQ ID NO: 114385 - protein, 86 aa, Gossypium hirsutum
  Clone ID: uC-gsronu33B125f06b1.pep
RPLVRAVAAENQSEPSQNDLPYVLILKPPAAFSIFGDHLFHSPKFQFLKAFESPLPLYQILLTHAQGVQAILTLTSGFVTGDTIRL

SEQ ID NO: 114386 - protein, 112 aa, Gossypium hirsutum
  unsure (1)..(112): unsure at all Xaa locations
  Clone ID: uC-gsronu33B125f12b1.pep
TKCLYLQLINILNKPFRMFFLKAHYXNRGFFCNLARFSRFSSKSALSFSRVRWVSFKSDLPFSTLSVFSFKSDFPFSTFSLPSLKLGLVFLNSSSKFFNSSAFAQVIPNAWP

SEQ ID NO: 114387 - protein, 67 aa, Gossypium hirsutum
  Clone ID: uC-gsflmaxxa002f05b1.pep
DMRERSSQHRLKEKEKLRGRRSLLEGAGMMKFKKGRPRLGEHVFAVHDTLWGRAKDSLLQHDGGHYR

SEQ ID NO: 114388 - protein, 61 aa, Gossypium hirsutum
  Clone ID: uC-gsflmaxxa002h01b1.pep
NFDKVACLKIFLNSILSGLELLATQFAPYINRCPAEALVAFQEVWYLIQSSKLKKNCQTLK

SEQ ID NO: 114389 - protein, 75 aa, Gossypium hirsutum
  unsure (1)..(75): unsure at all Xaa locations
  Clone ID: uC-gsflmaxxa003h05b1.pep
GLRGLRGGHTKALRGLLQAVDKGEPRSLELLGEIYAKGAGGERNYTKALEWLSLACEXGFYSAYNGMGYLHVKGY

SEQ ID NO: 114390 - protein, 58 aa, Gossypium hirsutum
  Clone ID: uC-gsflmaxxa004h09b1.pep
FCCGIVPIALLDLHFSATMLTSDFRTGSTEGTSSGVYCYEAWAREPYWTFTRSHGYIT

SEQ ID NO: 114391 - protein, 79 aa, Gossypium hirsutum
  unsure (1)..(79): unsure at all Xaa locations
  Clone ID: uC-gsflmaxxa005b07b1.pep
ENHSGHQHYRTGDAYGATCCYNLLSLRLYYHQQXLVMGARIYLESSYHDSQYDISLLVWQDPREVNWGAQFGNSYVLGY

SEQ ID NO: 114392 - protein, 121 aa, Gossypium hirsutum
  Clone ID: uC-gsflmaxxa005c04b1.pep
KISEMSWLRTAVNKAVELFTHLSTPFLSLFLFFPLFSLLFIFIFFYFSLSPFFYSFLFYHFLITSFLFSYITYSSIFHSFTFFSPYFFFYLIYYFLYPDLVLTILPFTLLAHPLLFSFYII

SEQ ID NO: 114393 - protein, 54 aa, Gossypium hirsutum
  Clone ID: uC-gsflmaxxa005c08b1.pep
SVLCVNITGVEITYLDSPSHDKRTVKKRTRKSADRNRLRMQQMRVLVHLEVTCP

SEQ ID NO: 114394 - protein, 48 aa, Gossypium hirsutum
  Clone ID: uC-gsflmaxxa005d01b1.pep
SRRVRWPARRTMAGPAPGGSLGTSPVFKRARQLTVNPLFFRSAGSMTD

SEQ ID NO: 114395 - protein, 57 aa, Gossypium hirsutum
  Clone ID: uC-gsflmaxxa005d06b1.pep
EKSGHIVVRLFLFKESLKGKLSSKNPEEKSKELGLFLGGRVTMFQEILFHLCRNSLL

SEQ ID NO: 114396 - protein, 28 aa, Gossypium hirsutum
  Clone ID: uC-gsflmaxxa005f05b1.pep
ERLEGKIQGCSFRALKACVYYNVSLNSS

SEQ ID NO: 114397 - protein, 38 aa, Gossypium hirsutum
  Clone ID: uC-gsflmaxxa005h09b1.pep
RKLSLQIRLIWLIAQDALSHGLHPAEYISLEVHRISPP

SEQ ID NO: 114398 - protein, 20 aa, Gossypium hirsutum
  Clone ID: uC-gsflmaxxa006c08b1.pep
LNASLQGQVKSKSEKGERVT

SEQ ID NO: 114399 - protein, 36 aa, Gossypium hirsutum
  Clone ID: uC-gsflmaxxa008d08b1.pep
VVASWSLVRWRKRGALSVRASGGAIAEHRGFTGRVG

SEQ ID NO: 114400 - protein, 92 aa, Gossypium hirsutum
  unsure (1)..(92): unsure at all Xaa locations
  Clone ID: uC-gsflmaxxa008g03b1.pep
PVLLRVIRFLVPLLCFPHPLILDVCSLSLSCLLRWVVLPALSALPGFPVVPAVLRLSSGKCGLCPWVWPAAVXGXMGCDYRXRGSHRVFRRG

SEQ ID NO: 114401 - protein, 52 aa, Gossypium hirsutum
  Clone ID: uC-gsflmaxxa008h12b1.pep
SRMVNWKHLMDGAASASLECLKRAIIRDLQMIIWNGCHIGFMVYPLISGSPR

SEQ ID NO: 114402 - protein, 147 aa, Gossypium hirsutum
  unsure (1)..(147): unsure at all Xaa locations
  Clone ID: uC-gsflmaxxa009f11b1.pep
PRALFKIHVAMRYCLLAGGXRVRPGLWVADCDRCSGRECMASPCSXAVEQPHTMDLVHDDPPCMDXDDLRRGKPTNHKVYGEDIAALAGDALLAFSFEHITGSTVGVTPERIVRAIGELAXSHGTEGXAAGQVVDIXSEGLTDVGWV

SEQ ID NO: 114403 - protein, 61 aa, Gossypium hirsutum
  Clone ID: uC-gsflmaxxa009h05b1.pep
HACAHASADAWARTVFMSQPTLFILFYSWLVLDTGRTRCSLVSYTDGRPLNRITTVYSQRN

SEQ ID NO: 114404 - protein, 56 aa, Gossypium hirsutum
  Clone ID: uC-gsflmaxxa010d06b1.pep
PRVRRNFRIYKAKGDIIIMASSAIASCCRELSVELPYQEIKSLELVKNSVDFFLFG

SEQ ID NO: 114405 - protein, 44 aa, Gossypium hirsutum
  Clone ID: uC-gsflmaxxa010h09b1.pep
KIVKDRHMRQYSPSLHYHSISIHIMDLIRHIGPPLDAEFESDVL

SEQ ID NO: 114406 - protein, 50 aa, Gossypium hirsutum
  Clone ID: uC-gsflmaxxa011c03b1.pep
PTMITTVYDAGLSRSWSFAMVPHSEISCVVIRTFSFLCIDHVQFRSLSLF

SEQ ID NO: 114407 - protein, 50 aa, Gossypium hirsutum
  Clone ID: uC-gsflmaxxa012a03b1.pep
QANPIEETSRITYKSITSLKLSQTILRYGCKNRNFMAKSPTIIQDYCPRV

SEQ ID NO: 114408 - protein, 61 aa, Gossypium hirsutum
  Clone ID: uC-gsflmaxxa014b06b1.pep
YLVTPDNSSPHKASLHLSLVRLWSLIAVCSLPKVHVSQTIDSYGQVPPKDVPAELGVSEQE

SEQ ID NO: 114409 - protein, 33 aa, Gossypium hirsutum
  Clone ID: uC-gsflmaxxa015c12b1.pep
GGFLEKSIVIKFLRRVFEIFAKGVKKSEGLDQI

SEQ ID NO: 114410 - protein, 35 aa, Gossypium hirsutum
  Clone ID: uC-gsflmaxxa015e04b1.pep
RLSKRLSSASRMKWEYQKKKDRRLASQDLREGFPY

SEQ ID NO: 114411 - protein, 35 aa, Gossypium hirsutum
  Clone ID: uC-gsflmaxxa015f05b1.pep
FIVRPTLPWKVNEPVQPSEGLTRQGSGIIGTICPF

SEQ ID NO: 114412 - protein, 134 aa, Gossypium hirsutum
  unsure (1)..(134): unsure at all Xaa locations
  Clone ID: uC-gsflmaxxa026b07b1.pep
SLRASPGARELDQTPTRAEALDVAANSMRSIALNKAHYSVGEQPEHKKTEASYEASXKVKGQHTAWGCISMLLTFEQSYICKICIPERLADTNVFCPKNIDISYQGHQKSGGWTSLVTVLISSKPITIFSLKFL

SEQ ID NO: 114413 - protein, 72 aa, Gossypium hirsutum
  Clone ID: uC-gsflmaxxa026d09b1.pep
SNLMGLNNFHFSFYLKMIKILKFFALNLFDQFPIGHGLLFQWVNVLLSLLVTLIVKRLADQPNVCLPFLVPN

SEQ ID NO: 114414 - protein, 41 aa, Gossypium hirsutum
  Clone ID: uC-gsflmaxxa026f06b1.pep
YYQRLTTKGGCPYTVQATVYLNALRKQAQTGLPKCLRSISI

SEQ ID NO: 114415 - protein, 34 aa, Gossypium hirsutum
  Clone ID: uC-gsflmaxxa026g11b1.pep
YFFLYFFFYFFFYFFFIFIFFYFFFFFYLFFFFF

SEQ ID NO: 114416 - protein, 119 aa, Gossypium hirsutum
  unsure (1)..(119): unsure at all Xaa locations
  Clone ID: uC-gsflmaxxa027a11b1.pep
FQQASNPCGSFLNTSXFKFRRKKESXATLSRVVTGHGNMINAAYTLMFHTNLMFSXRLILPPLRYLLTDVPPQPXNSPPDDFFRPERTAGSDXWVQKKGQCPASDSRNKYNNVKSSGKT

SEQ ID NO: 114417 - protein, 40 aa, Gossypium hirsutum
  Clone ID: uC-gsflmaxxa027f04b1.pep
PSLKRLIFNRQRQRKKVRRRRSMVYWRSLYRLDCNQLQLL

SEQ ID NO: 114418 - protein, 37 aa, Gossypium hirsutum
  Clone ID: uC-gsflmaxxa028e03b1.pep
GTKHTIDQYYFTKMFLIDNAINLFKDIIQINRSCRTK

SEQ ID NO: 114419 - protein, 81 aa, Gossypium hirsutum
  Clone ID: uC-gsflmaxxa028h10b1.pep
ADSIDCSPRSRNTDTWDDPALPTTLHPKLRLMCSNGGTKVPGPHDKNLCNASGDTRMAVDDRHTSLIYVHQRLYLSFLRGC

SEQ ID NO: 114420 - protein, 62 aa, Gossypium hirsutum
  Clone ID: uC-gsflmaxxa038a10b1.pep
CNQRLIKGFKTANKLNILRFVEQLFHSMPVFSLIIDLFTKLQKYPSIFQIFTPLITKQAHAS

SEQ ID NO: 114421 - protein, 26 aa, Gossypium hirsutum
  Clone ID: uC-gsflmaxxa038d07b1.pep
YYYRRILALLDSAITQNAHPRFLYIC

SEQ ID NO: 114422 - protein, 85 aa, Gossypium hirsutum
  Clone ID: uC-gsflmaxxa039c01b1.pep
CSNFPLKKGTCSIRLFYLGTIYSLASGWDIKLVTDLGKLRVQLDTPSNHGFESMVFFVRWGRDHRKEMELKLLKGKRYTQRRIRG

SEQ ID NO: 114423 - protein, 56 aa, Gossypium hirsutum
  Clone ID: uC-gsflmaxxa039d01b1.pep
DEQGGLFTTNSGVPPPPSAGTPSTTPTLPQRSMILSALLLKQPSIKRDGPKSSLFV

SEQ ID NO: 114424 - protein, 44 aa, Gossypium hirsutum
  Clone ID: uC-gsflmaxxa042a10b1.pep
ANPNHIAGSVFNPMSGFFPSPRRSTKEVPFHYIPAFKRVIPNLY

SEQ ID NO: 114425 - protein, 53 aa, Gossypium hirsutum
  Clone ID: uC-gsflmaxxa042d01b1.pep
GPCPASVFLGLVQMALKVVVFLFRPWAASFPPPLGSFSGSGGFSSAGSSSPPV

SEQ ID NO: 114426 - protein, 71 aa, Gossypium hirsutum
  Clone ID: uC-gsflmaxxa043c03b1.pep
TRPVIPLRTNPPVILHSHQGTSGDALKKTEGPKQTLTCNTIPLTLHSPTSDHHDKDLHPKHGTEPKPPTDS

SEQ ID NO: 114427 - protein, 78 aa, Gossypium hirsutum
  unsure (1)..(78): unsure at all Xaa locations
  Clone ID: uC-gsflmaxxa043g04b1.pep
VRFKLVLATNAGLGGGAADLESRKPWLMNVVPTIVMATLSVLYERGLLVIYHDWLXSFYTYTGAYYLMHANGVFSLYQ

SEQ ID NO: 114428 - protein, 86 aa, Gossypium hirsutum
  Clone ID: uC-gsflmaxxa045a07b1.pep
TNKNFYRKKQSLLCDSELPLITSSHIRESLYFFSWKMHIFNDRYVSDSTRACLETINMGSDVLQPQDCLIRRITETFDRVCGTQIR

SEQ ID NO: 114429 - protein, 70 aa, Gossypium hirsutum
  Clone ID: uC-gsflmaxxa045c01b1.pep
PECPRSDLTLGVPTHTDMTGITILKPNDVQGLHACQADHSDEGAYITNALIVYIGDPVQIVSDRKLRLML

SEQ ID NO: 114430 - protein, 93 aa, Gossypium hirsutum
  Clone ID: uC-gsflmaxxa045g02b1.pep
HAATLEHPKHADSVHYKVAGQDVSHLEPLALQTIPRGLLLLRWTSGHASSCVDASEASLELGPIPELRGIGYCRTDCSDHELYAVMDAAHGMS

SEQ ID NO: 114431 - protein, 115 aa, Gossypium hirsutum
  Clone ID: uC-gsflmaxxa045h02b1.pep
FGNDSHNRCNVLSNQHPLLSSINKKGSLHSIFSRASFHHPGCSASNGTRLGRWISFVSFHGDSKPVSSLLRVDTCRELHGCCRSSNRSASHDSGRVNEGRGGPGNSGAAAPAGAA

SEQ ID NO: 114432 - protein, 61 aa, Gossypium hirsutum
  Clone ID: uC-gsflmaxxa045h05b1.pep
LSAPFFFFFFFDQRQISFWMAFFFFFFWGKIQNHTCRWHHFFKKKKIMGFPIKPASNFQST

SEQ ID NO: 114433 - protein, 56 aa, Gossypium hirsutum
  Clone ID: uC-gsflmaxxa048a04b1.pep
TAYKCSLFVSLYIIILIKIVMNEYCWAGLLNSGLLTRAFVGLALFLCYLFLFDGPL

SEQ ID NO: 114434 - protein, 106 aa, Gossypium hirsutum
  Clone ID: uC-gsflmaxxa048b10b1.pep
VELVGGRLLLMGNADSLSKQSSSRMYLRRFNTHDIDPQEQNFLYVGYAMVSGEIHQPRLVSRCSFQQMEHVLEIPLAWTTCPTCGKRMMNPMMIHHRAPYKCTCCN

SEQ ID NO: 114435 - protein, 102 aa, Gossypium hirsutum
  Clone ID: uC-gsflmaxxa048c05b1.pep
MDSLQGFQTSNINPSSTTNLNPNFPANLSITTVGTTAGATTNTIPLSAAAASSSSSSSSTSPSTLSRYENQKRRDWNTFGQYLRNHRPPLSLSRCSGAHVLE

SEQ ID NO: 114436 - protein, 81 aa, Gossypium hirsutum
  Clone ID: uC-gsflmaxxa048c11b1.pep
RGVASKKTFSQLRHFINPIQLKRNPNNSINVWFILHRRPWKNLEFKKKRMGKFFNNKLSLSNIEGAFSVIRERIGPKRGNF

SEQ ID NO: 114437 - protein, 116 aa, Gossypium hirsutum
  unsure (1)..(116): unsure at all Xaa locations
  Clone ID: uC-gsflmaxxa048d09b1.pep
PEGIDIVTINRPNSQNFLTXRPMMVDLTKAIKALAKDNSARIIIWSGAGRALCSGVDLTAAQDAFKGDIKDPXLIRLISMEHCPKPIIRSFNGVAITVGIEIDLASDTLVGAKGAT

SEQ ID NO: 114438 - protein, 111 aa, Gossypium hirsutum
  Clone ID: uC-gsflmaxxa049e09b1.pep
LVPFEECIELHSSDNAVLRVPEYLLLTHNGRTFNIIVDPMNLRDGLHYYEVYGIDCKAPWRGPLFRIPITITKPKAVMNRPPLVSFSRMSFLPGHIERRYIEVPLGASWVE

SEQ ID NO: 114439 - protein, 55 aa, Gossypium hirsutum
  Clone ID: uC-gsflmaxxa049g11b1.pep
HIRNWTVITDTFLDLQDNCWPCMFLLHGSITQHSASAFVHLTLEGSNRLFNGITC

SEQ ID NO: 114440 - protein, 92 aa, Gossypium hirsutum
  unsure (1)..(92): unsure at all Xaa locations
  Clone ID: uC-gsflmaxxa049h05b1.pep
SEAAFHWFKEVIVRTPTIYASIGLGNFYVLPYITWILTIXTNRKCRIPNCIGLRKAAEFDIQLETEXCVKNYNTLVKEGAKRGLFKLPPEHH

SEQ ID NO: 114441 - protein, 79 aa, Gossypium hirsutum
  Clone ID: uC-gsflmaxxa049h07b1.pep
NPSSFKNYRHSLLREQFASQNISALLPCLATYPMGSSKFTCWNLFAQVHKITVIERQVTCEQHTELSLPHDHRSAVAPA

SEQ ID NO: 114442 - protein, 77 aa, Gossypium hirsutum
  Clone ID: uC-gsflmaxxa051a09b1.pep
EILSVIIKKIEVCNTLMTVSISYTKLAIKREYGLDIEQLRNISTHLVGTVLKPIGRGSQCRWITQPSCRNQRTGKPE

SEQ ID NO: 114443 - protein, 128 aa, Gossypium hirsutum
  unsure (1)..(128): unsure at all Xaa locations
  Clone ID: uC-gsflmaxxa051b06b1.pep
KKKKKNSKKXRNRYKKKKNKKKEKRNKSKIIKEGEVNKKRIKKRXKKVKKKDNKEKKYRKRXKEEKKKNKKERNKEKRYNREKKKKRKIKIKKXKRKKKIKKKKKNIKKREKKENKIKRKVEEKIVKQ

SEQ ID NO: 114444 - protein, 36 aa, Gossypium hirsutum
  Clone ID: uC-gsflmaxxa052e04b1.pep
KICKYQNCSSSLLRLLDADSFRWLLLHLVIYISTFL

SEQ ID NO: 114445 - protein, 80 aa, Gossypium hirsutum
  Clone ID: uC-gsflmaxxa052h03b1.pep
RSDLKSYWYGSQWPTVTKVPAISFIAHRYHRFAFTCLCVLIWPVSRPSAFLTLFEAQAMTESAFPSYSKYFHCIPYFFIN

SEQ ID NO: 114446 - protein, 60 aa, Gossypium hirsutum
  Clone ID: uC-gsflmaxxa054c05b1.pep
VIFTTAGLSTCGLFRTDYRIITSKCTVFGISNQLIPSLLNYVSSSIRPWIDTSSCARTFY

SEQ ID NO: 114447 - protein, 45 aa, Gossypium hirsutum
  Clone ID: uC-gsflmaxxa054c06b1.pep
APDCTCTGSHLLMIPFGITGYTRRCLSLLAYILRSFSGYIFENNG

SEQ ID NO: 114448 - protein, 56 aa, Gossypium hirsutum
  Clone ID: uC-gsflmaxxa054d08b1.pep
VCRESAAFCPAILYLMTQQMCISMKLYTTYFSEPSFVTQSCISRVIIRLGLVKGYS

SEQ ID NO: 114449 - protein, 104 aa, Gossypium hirsutum
  Clone ID: uC-gsflmaxxa054e08b1.pep
FSSWPISVASQRGQAFIVYKIILPSSILVSHGSPISSKWEFFLGHILTLPFMYDQHMFAYEGYQLGSILSSALWGITKAEQAEYGYLAVDSNRLLVFVMTLLEW

SEQ ID NO: 114450 - protein, 72 aa, Gossypium hirsutum
  Clone ID: uC-gsflmaxxa054g03b1.pep
SWLKLMCRGGVDSWTGVINYYGPRPSTRSHQVFVANHTSKIDFIILEQMTTLVCIMQKHSGWVAFIHKTILE

SEQ ID NO: 114451 - protein, 62 aa, Gossypium hirsutum
  Clone ID: uC-gsflmaxxa054h01b1.pep
KRRALKGYIMHKCSALNQQHGSYFEHRNYKNVYRSNAWLFLLGRVDTEEKELAIMEVIHFLD

SEQ ID NO: 114452 - protein, 54 aa, Gossypium hirsutum
  Clone ID: uC-gsflmaxxa055c02b1.pep
QIQKRCLQSGMKYVNTFYLSHYLPDNPNGKIIMCFPNNTPFRFSHTNTILNSIF

SEQ ID NO: 114453 - protein, 96 aa, Gossypium hirsutum
  Clone ID: uC-gsflmaxxa055e08b1.pep
LPPVTEIRSQVLAEGSCMLGEEVLRKMSVSQAVQRTKPMSVTADAAPLLLEAKSGEEAAPLNDVAHRNRLANETRLDIRHATDTGSRELHHHNSLD

SEQ ID NO: 114454 - protein, 71 aa, Gossypium hirsutum
  Clone ID: uC-gsflmaxxa057c01b1.pep
PWVSLYVYHSPPRTHCGRWTELRKKGVETLDSSYYEGTNCPTQLTEDENFNPFLDLASTTENKGFNYQTAR

SEQ ID NO: 114455 - protein, 116 aa, Gossypium hirsutum
  Clone ID: uC-gsflmaxxa058e01b1.pep
FVFCLNIKQKQGLFYIHGGKKHATPEREAKQRARPNWDETNSMGKARDAYMDNSPSQSTIVVPHGVTAEPSKQQLLEPPPSQAFGQPVTHRDHRLRVMERVLYGRAYTLYSTPKLG

SEQ ID NO: 114456 - protein, 104 aa, Gossypium hirsutum
  Clone ID: uC-gsflmaxxa060a03b1.pep
AGTESQFRPTPTLSITASWHRPATNYDEPLAPGERLAFKPESGVGIHRITRGRNPAHMDAVKSAIKSSKMVQHPRFCRLMVLDKNGFQHWRKTPTDIGQHVGCR

SEQ ID NO: 114457 - protein, 99 aa, Gossypium hirsutum
  unsure (1)..(99): unsure at all Xaa locations
  Clone ID: uC-gsflmaxxa060a08b1.pep
GERGAFRRGLGGRTDRGQRGRRRGRREEEEKWVPETKLGRLVKTGKXRPLEQIYLHSLPIKEYQIIDQLVGPXLKDEGKKITPDQEQTLAGQGTRFKAF

SEQ ID NO: 114458 - protein, 100 aa, Gossypium hirsutum
  Clone ID: uC-gsflmaxxa060a12b1.pep
LISLAFVDILLGLTLLICTLSFFLIFRIQYQNGASTWSCSSNSKHGKGVCLEHPWDLISSTKMLGLLKVHHGAFYPFSFVYIPWIMTRNSSGLSIPNSPK

SEQ ID NO: 114459 - protein, 95 aa, Gossypium hirsutum
  Clone ID: uC-gsflmaxxa060f12b1.pep
YQWICVKPQYGTSGGLYLLSSAFSCSSFGSTLSFSHSLATVSQTPKLHHNSSLILKVSSSTSLYSIFAPLLSEAVVLCVRCFTYDSTVDKIERGR

SEQ ID NO: 114460 - protein, 38 aa, Gossypium hirsutum
  Clone ID: uC-gsflmaxxa061f08b1.pep
GRVGTTRLHCTTLAKINPMSCITKIAHICLKSVLRLMS

SEQ ID NO: 114461 - protein, 87 aa, Gossypium hirsutum
  Clone ID: uC-gsflmaxxa064b06b1.pep
IMTASHYTPAEDFFKLVPAFGHASMVKHQPKHISRIIPSLMAPHLSLNEQQYSSPRTVLRQTQNPQLNSPPCSPQISHGNICASRSV

SEQ ID NO: 114462 - protein, 94 aa, Gossypium hirsutum
  Clone ID: uC-gsflmaxxa064c12b1.pep
YPHETTLNTTLTIYISYISAIKNYFHHITIIPGPLSTISIFPSLNNLFYLHPMITKILYDKQSNTKKKNDLSKYHLKTVFYSPFLEPTYQNYSS

SEQ ID NO: 114463 - protein, 65 aa, Gossypium hirsutum
  Clone ID: uC-gsflmaxxa067c02b1.pep
NISLEVPVGSLVAVGDGSGQGKSWPMYLVLGMIPASANTGVAIGGTGANETHVQRMDNAPVRDNI

SEQ ID NO: 114464 - protein, 42 aa, Gossypium hirsutum
  Clone ID: uC-gsflmaxxa067f02b1.pep
DLSPVTMTSFVVPNRETSSGDFKDKFVPRAPLPRFSQAAAQK

SEQ ID NO: 114465 - protein, 57 aa, Gossypium hirsutum
  Clone ID: uC-gsflmaxxa067f03b1.pep
GGEFINRFFPVTSKYGLLAGATRDARAIGQRIEWDTAGTRKNMRRGYRCGILKKSSV

SEQ ID NO: 114466 - protein, 131 aa, Gossypium hirsutum
  unsure (1)..(131): unsure at all Xaa locations
  Clone ID: uC-gsflmaxxa067f04b1.pep
PRLQLVTLVLPGVKSSAGKGLHSVKKDYMAPDEKLPSAGNKIAEEADDERTKGTTMSMATYEIYVLKVLKQVHPDADIGSHAMGIVNSCIPCIFQRVDEESXERGRYNMRPTSTXQEIHSARRLLLHGELL

SEQ ID NO: 114467 - protein, 59 aa, Gossypium hirsutum
  Clone ID: uC-gsflmaxxa067g01b1.pep
VANNVRLSHQFLLLIIINTPSAVRYTLQHPFITQMVHIISKTPLNPTVSHTVAQHFSKT

SEQ ID NO: 114468 - protein, 71 aa, Gossypium hirsutum
  unsure (1)..(71): unsure at all Xaa locations
  Clone ID: uC-gsflmaxxa067g03b1.pep
DCKKRYLSSVAAAVHNQRPQVNMNRDXTNVDINXQIGSRLPIAXMPHGTYFHNIEGNPGQGGKFVSAAGTF

SEQ ID NO: 114469 - protein, 112 aa, Gossypium hirsutum
  unsure (1)..(112): unsure at all Xaa locations
  Clone ID: uC-gsflmaxxa074e01b1.pep
LFFTTKPVPCGPSCLPKYLPSKESDATMRNEEPRTHGTTXTMGQIPELERKAARQSRAAAAPDANAETVLSMHKRQIELQXESRREKMNPHPEEVASGSPIEPPRPCHAGES

SEQ ID NO: 114470 - protein, 72 aa, Gossypium hirsutum
  Clone ID: uC-gsflmaxxa074f10b1.pep
HYFEALRMKATYMLRHPSSFSWRVLIPVRSLHHPPIIIIAPPLETVPFSFLFFLPKARSHTCAPSCHMIPPQ

SEQ ID NO: 114471 - protein, 62 aa, Gossypium hirsutum
  Clone ID: uC-gsflmaxxa074h02b1.pep
NTTTFNGILLIHVNTAGGTTAPFLGPKARVMAADTAVRHSMARSTSATAQTTKDLARTLIMT

SEQ ID NO: 114472 - protein, 52 aa, Gossypium hirsutum
  unsure (1)..(52): unsure at all Xaa locations
  Clone ID: uC-gsflnu33B002a02b1.pep
MVKGRQGERVRXLYVRGTILAYKRSKSIQPTTTLSIQIEGVNTKEEAVWYAG

SEQ ID NO: 114473 - protein, 73 aa, Gossypium hirsutum
  Clone ID: uC-gsflnu33B002a07b1.pep
TPSFNFFSSVFYLKKLKENPNERDMEFSISSHLPLIYPIIYIKFGDMTAVEKLEFILNLLHLTTLTVKHWIII

SEQ ID NO: 114474 - protein, 82 aa, Gossypium hirsutum
  Clone ID: uC-gsflnu33B002b05b1.pep
RGVMCLGTSGMGLRQSRNSKVRGVRGFGAKRAAHYLHNQTWVVSESRRLLLTGKVLHASVLDSAFLSKQGSEIRSLKQKTQQ

SEQ ID NO: 114475 - protein, 47 aa, Gossypium hirsutum
  Clone ID: uC-gsflnu33B002b11b1.pep
ISRSKSSVGSFGTSLCLRRRCSVCQSERVKEKKRNLTEEKKQSKSYL

SEQ ID NO: 114476 - protein, 63 aa, Gossypium hirsutum
  Clone ID: uC-gsflnu33B002c09b1.pep
AATFPSTISWTGVSMSGAGASETTPRTICCHARVRLVIRLIGVVQRCDYDKCCQKSGRVGGRV

SEQ ID NO: 114477 - protein, 30 aa, Gossypium hirsutum
  Clone ID: uC-gsflnu33B002d10b1.pep
TRLDPQRFLHVLLGARRSAGYVLSRYVHII

SEQ ID NO: 114478 - protein, 74 aa, Gossypium hirsutum
  Clone ID: uC-gsflnu33B002d11b1.pep
DAWADAWVSVHHNFLRSGTHISIWFAMRSFLDWVSCWSTTPQVSIREEVETPPKKEETNSLMPLDTEDLWKKNI

SEQ ID NO: 114479 - protein, 99 aa, Gossypium hirsutum
  unsure (1)..(99): unsure at all Xaa locations
  Clone ID: uC-gsflnu33B002f11b1.pep
GWCIRSCSVYPTHSPTLQTLPRLYHQNVIDHYNNSCNVGSFDKIDPNVGTGLFGAPACGDVMKLQIXKIHEDSGIIVDACFKTFGLRPRVNCLLFWPLT

SEQ ID NO: 114480 - protein, 67 aa, Gossypium hirsutum
  Clone ID: uC-gsflnu33B002g01b1.pep
MATAEGVLFQTAIHVEKPEEVVKAGEIVTDEVPAVASAAEPVVEEPKEAVPEALSGEPQAPQTECHS

SEQ ID NO: 114481 - protein, 37 aa, Gossypium hirsutum
  Clone ID: uC-gsflnu33B002g04b1.pep
AKLNLLSSHIWFRLILPFLCSANSGCFSEIIPIMRWI

SEQ ID NO: 114482 - protein, 74 aa, Gossypium hirsutum
  unsure (1)..(74): unsure at all Xaa locations
  Clone ID: uC-gsflnu33B002g05b1.pep
GAHIGPEPTIDRFDAVMPGTDERSVLGNTIVVQAYMLFSGLTTFGTAFLXSFECTQQPHPLLEYVTLADTPGVL

SEQ ID NO: 114483 - protein, 47 aa, Gossypium hirsutum
  Clone ID: uC-gsflnu33B002h07b1.pep
MQQGTVGTETEVTREDQQNINKLGRLNNLFHEIEDETKVAFEAIDNL

SEQ ID NO: 114484 - protein, 65 aa, Gossypium hirsutum
  Clone ID: uC-gsflnu33B002h11b1.pep
WKYVISATYSSPVEIHESHSSILAPFFFSAKTNSRFHITTDCIYSIFCVFLCKNYNTIYAAANAW

SEQ ID NO: 114485 - protein, 34 aa, Gossypium hirsutum
  Clone ID: uC-gsflnu33B003d01b1.pep
YGIQSKSIYLMASRIGLIHFIVALSPSDFGVTDP

SEQ ID NO: 114486 - protein, 50 aa, Gossypium hirsutum
  Clone ID: uC-gsflnu33B003d10b1.pep
PFLGSIIFYLISRFKLSQPLLPSHRRGVSPHLSGPLHSWCLWVSLLKLHP

SEQ ID NO: 114487 - protein, 63 aa, Gossypium hirsutum
  Clone ID: uC-gsflnu33B003f09b1.pep
TRTLIFALLVCFRMRNKNKTPSNRMYIVECYINDWDYILELLLISHYSFTLADTRIDMEQVPC

SEQ ID NO: 114488 - protein, 63 aa, Gossypium hirsutum
  Clone ID: uC-gsflnu33B003g03b1.pep
FLLFNILVTVGKPVVSGPVSVHIIYYRPLQSSMSVICTFTKSINLIYMVTEFSHPSMLSILIL

SEQ ID NO: 114489 - protein, 40 aa, Gossypium hirsutum
  unsure (1)..(40): unsure at all Xaa locations
  Clone ID: uC-gsflnu33B003g12b1.pep
SIPYSHPCXINRLTIYISIFWIRCQCSKNVPIILRLFGRV

SEQ ID NO: 114490 - protein, 59 aa, Gossypium hirsutum
  Clone ID: uC-gsflnu33B003h02b1.pep
SRVRLIAQGKVRFWYIGTASRRCYGKCPLSQSFKRENKGTSTRTVTILGRVHLGTIYLA

SEQ ID NO: 114491 - protein, 38 aa, Gossypium hirsutum
  Clone ID: uC-gsflnu33B003h04b1.pep
SFIPDLIHLTQCTFASASSVCGAFVLNTPLLFIYSSNA

SEQ ID NO: 114492 - protein, 113 aa, Gossypium hirsutum
  Clone ID: uC-gsflnu33B003h08b1.pep
TQIIQKTKINIIYNHGPAPLWVPRFLPRACHLFFFLWGPSNPFPGPPVFPPSSSAFPCWAPNLFSLDTSPPLSRGDFPFGAPPLLPFPTLSPSSFGYRDISLLHFLLFPAVCG

SEQ ID NO: 114493 - protein, 61 aa, Gossypium hirsutum
  Clone ID: uC-gsflnu33B003h11b1.pep
MGPIKRAPLFFFFFFFFFFFFFFFFFFFFFFFFFFFFFFFFFFKPSTPRKSSRGLTCTSRF

SEQ ID NO: 114494 - protein, 73 aa, Gossypium hirsutum
  Clone ID: uC-gsflnu33B003h12b1.pep
LSSQSVIHRILTLVLLLDGNSVYPHLYLVRSFPMLLFLYLENLSHFTLASSHSVFRASVLKPIPSLVAFADAW

SEQ ID NO: 114495 - protein, 70 aa, Gossypium hirsutum
  Clone ID: uC-gsflnu33B004a09b1.pep
VNLVLLKGPPLFFFFFFFFFFFFPFFFFFFCFFFFFFFFFFFFFFFFFFFLGAKKNSFKYEYGLFNMGFT

SEQ ID NO: 114496 - protein, 125 aa, Gossypium hirsutum
  unsure (1)..(125): unsure at all Xaa locations
  Clone ID: uC-gsflnu33B005b06b1.pep
LRVRPRVREHVDENIYGGSSEFRPTVPDIKDFMPIYMNLTACMKVSLLLHHGVSVYQSMQMLKYNNGIMNTLSTDGANMYDLTIQNNVEVVTLETKAMTAXLQGLCXDEESLIAYKINKVLVSME

SEQ ID NO: 114497 - protein, 125 aa, Gossypium hirsutum
  Clone ID: uC-gsflnu33B005d11b1.pep
MEETEKPIEVLAMEALGKGYDITGDFRLKYAKGTRLLVLDETNKRDIVFPGAASFTMKEVSQDIRLDKGDRIRFKSDVLEFNQMSELLNQKSSIQGKVPSGYLNSIFDLSGNWLYDAADTKTLAF

SEQ ID NO: 114498 - protein, 69 aa, Gossypium hirsutum
  Clone ID: uC-gsflnu33B005e12b1.pep
SFSHFPVLISFLDAALCSLRSFSCLWTASDRAWAYWAPRCPDERFRSGSHIGPALLAPCRLAVLFYRGL

SEQ ID NO: 114499 - protein, 49 aa, Gossypium hirsutum
  Clone ID: uC-gsflnu33B005g11b1.pep
LVSLRMMEVALISIVSHLSTPKLTMVGVGRLSKNISPLQPRLRPSESDA

SEQ ID NO: 114500 - protein, 54 aa, Gossypium hirsutum
  Clone ID: uC-gsflnu33B006a08b1.pep
NGPPLFFFFFFFFFFFFFFFFFFFFFFFFFFFFFFFFFFFFGIIVAIIVDLMFQ

SEQ ID NO: 114501 - protein, 43 aa, Gossypium hirsutum
  Clone ID: uC-gsflnu33B006c06b1.pep
TPTTGGAHDGMGALVPIRKITFHERNGLRNAKHKDEAWATAIE

SEQ ID NO: 114502 - protein, 38 aa, Gossypium hirsutum
  Clone ID: uC-gsflnu33B006c08b1.pep
TRAPQKGRPLYFFFFLFLFFFFFFFLFFFFFFFFFFFY

SEQ ID NO: 114503 - protein, 56 aa, Gossypium hirsutum
  Clone ID: uC-gsflnu33B006d04b1.pep
LRQASKLSTHGFEPVSDNTVWLDSHSKSSSSIAIYARKNNSKSEPFMEPTFDEHVT

SEQ ID NO: 114504 - protein, 128 aa, Gossypium hirsutum
  Clone ID: uC-gsflnu33B006d07b1.pep
ALRNPGNTEPKRGDLKENSGTRTGNGKSTDKTGTHETHPTSAEKREHKKLEKTNKRKKQEPAKQENEDGHATAVKTKKNDENQQQIEKVENQSQYQGTRKKPEENQAARRNKKKPKRGPPEERGGKKH

SEQ ID NO: 114505 - protein, 81 aa, Gossypium hirsutum
  Clone ID: uC-gsflnu33B006d08b1.pep
IRKFNSRLNIHVSTGGVIGNGRVPIDLLNKMLTRLGDWKPPGSVRVQAEAVETLSLGETKRSQTVAPWRRGVEFNFFCKRT

SEQ ID NO: 114506 - protein, 58 aa, Gossypium hirsutum
  Clone ID: uC-gsflnu33B006d12b1.pep
SFPSGGNLLLCFLHVPLADVSCNLLLCILRATVWDINCFLGKIMGRYMQGFMQTLCIN

SEQ ID NO: 114507 - protein, 86 aa, Gossypium hirsutum
  Clone ID: uC-gsflnu33B006f07b1.pep
RPHSFISKTRCDRRSVLRIFNSRRGPSGLHPTSGALPPRARSRRLSRFQGGQPVNHHTHLFPRPPRSSPNSLKLPSPSRTRERTRG

SEQ ID NO: 114508 - protein, 75 aa, Gossypium hirsutum
  Clone ID: uC-gsflnu33B006f11b1.pep
GPLPSIISFWSSTGFRGWCRCLSSTSSMSFGCTLLRVLSCVPRDPISPFSVSLPQTVGCRMFLFLADSLYQHGCP

SEQ ID NO: 114509 - protein, 65 aa, Gossypium hirsutum
  Clone ID: uC-gsflnu33B006h09b1.pep
PTRPSTRPNKIKFFINKKINFHFNQWFIFYYYLVVIFWVGLFWGLKFLSPCMQSFSFFLGAFKVN

SEQ ID NO: 114510 - protein, 60 aa, Gossypium hirsutum
  Clone ID: uC-gsflnu33B008a01b1.pep
FGPSMVHYNDFAPNNTVSVVVAVLGNAKVTFSVQSLSFLLLVPAPRLLKSPVFVYNLSVV

SEQ ID NO: 114511 - protein, 45 aa, Gossypium hirsutum
  Clone ID: uC-gsflnu33B008c09b1.pep
LIGRLQVRTNEGLWKDISQLRRHTCDQRWGPNASMEHWQVKVLRT

SEQ ID NO: 114512 - protein, 60 aa, Gossypium hirsutum
  Clone ID: uC-gsflnu33B008d08b1.pep
MASKRTASLALFFALNVLFFSLVSACGSCPSPNPHSFPTPFPSSSGICPHDTFQFAASPS

SEQ ID NO: 114513 - protein, 98 aa, Gossypium hirsutum
  Clone ID: uC-gsflnu33B008e01b1.pep
LKTEYFNNTAQRTKWSNNSYCSIKETFILPMTTPPMVTSLSGLNLLLMTITALMMLSTGPCLNTLYYKIQCHIANRQGCMKGKGIDCKYHSSHETEAV

SEQ ID NO: 114514 - protein, 40 aa, Gossypium hirsutum
  Clone ID: uC-gsflnu33B008g07b1.pep
IKGFFFNNTPQITSWKKHSFHLLTEILNLSKTHINTYIII

SEQ ID NO: 114515 - protein, 46 aa, Gossypium hirsutum
  Clone ID: uC-gsflnu33B008h01b1.pep
RNRRWSHHGQVKGLLYRPVTVVSPLAQLCPIIKVDCCHLRPNGRDE

SEQ ID NO: 114516 - protein, 108 aa, Gossypium hirsutum
  Clone ID: uC-gsflnu33B008h09b1.pep
EAKRPSPSGDRKSLDIRFLGDTKLPCRRCTGSSLDPRKKTLERLGTVYTAEEAARAYDARARELQDPNLQTHVCDNIAIELTHIHRQSSTVVTTAPTAIALTLPSLCS

SEQ ID NO: 114517 - protein, 67 aa, Gossypium hirsutum
  Clone ID: uC-gsflnu33B008h10b1.pep
LIYLYIIHHKDNLINISKKIVSFFLEICILNNKLNIFIHMSLYKYLYPQNPCHTAFLMYVLAAILFN

SEQ ID NO: 114518 - protein, 51 aa, Gossypium hirsutum
  Clone ID: uC-gsflnu33B008h12b1.pep
HASAHAYANVYVLLKIAELNWWSNQCCYCELDIFNLFQTNPPIDSTLTDVY

SEQ ID NO: 114519 - protein, 69 aa, Gossypium hirsutum
  Clone ID: uC-gsflnu33B009c09b1.pep
YACDHAAAMMTLTKPAESPRHEKGQATMSSRVAVTSGIYGLKPRGYTLFEYATRFVDIHDRAEACIFKI

SEQ ID NO: 114520 - protein, 106 aa, Gossypium hirsutum
  Clone ID: uC-gsflnu33B009h07b1.pep
NKKNEEALKYSQGGGPPNWSRLQRPWSRPLFSLLRSTHIIDWGWRSFHPVWGSDRPPQTALYWRGERPGALALVIFRDIETINPLHKGERPEVGLWAPLVGLFFRE

SEQ ID NO: 114521 - protein, 78 aa, Gossypium hirsutum
  Clone ID: uC-gsflnu33B011b03b1.pep
NRGPGFDFGAPLKEVFPCLPGVVNFGPLEGPPPFFLFFFFFFSCCSSLFSSSLNHFPFSSFSQLLLFPTFPFVMTWRA

SEQ ID NO: 114522 - protein, 81 aa, Gossypium hirsutum
  Clone ID: uC-gsflnu33B011c02b1.pep
TESQDAPALFIGFCVLFCDPLYDISRARYYPFASDAGLLKAMIMQPYAFYFSLPVLCNKNATICYITINTLHTSSIYQKFT

SEQ ID NO: 114523 - protein, 39 aa, Gossypium hirsutum
  Clone ID: uC-gsflnu33B012b03b1.pep
SGPNPSHLKGWSSSSSRGSGFFTALSRYYASSADAVAFE

SEQ ID NO: 114524 - protein, 58 aa, Gossypium hirsutum
  Clone ID: uC-gsflnu33B012b04b1.pep
VHKTNSQNIRFKAKVPSKSDSKEMERTASYILHYNQLYVILTTERVGGRVGERVGGRV

SEQ ID NO: 114525 - protein, 70 aa, Gossypium hirsutum
  Clone ID: uC-gsflnu33B012f07b1.pep
TKTKTKTIKIKIQLETTTNSINGSGGKNLKKIIISLRMSHRWTSVQAYMIWCIWSDTAYRSCRQFLSPYL

SEQ ID NO: 114526 - protein, 92 aa, Gossypium hirsutum
  unsure (1)..(92): unsure at all Xaa locations
  Clone ID: uC-gsflnu33B012f09b1.pep
SLDTMDNVKVYIHDMEGIPSDQQRLIFFGEQLEDGRTLADYSIQKESTVYLVLRLRGGAXKKRKKKTYTKATKIKHKKMKVKLAVLQLYKVD

SEQ ID NO: 114527 - protein, 58 aa, Gossypium hirsutum
  Clone ID: uC-gsflnu33B012g04b1.pep
PAFVKILKKVLYMINNSWVNPTRKPVDVPFFKNYMPTGAVDHMEPCKRARASQVQLVK

SEQ ID NO: 114528 - protein, 56 aa, Gossypium hirsutum
  Clone ID: uC-gsflnu33B012h02b1.pep
CKGNWLVPMAISYKNGGHYKFFCRVQLYKYCIYSCNVKYGFFYLAKKNKKQIKTIQ

SEQ ID NO: 114529 - protein, 117 aa, Gossypium hirsutum
  unsure (1)..(117): unsure at all Xaa locations
  Clone ID: uC-gsflnu33B013a01b1.pep
MTNEPKARTDNAMGIEKLHGHSGIARLKLYYARGLFGLVDPSHGTGXAHAGLAHFNGHLLAMCADDLTYHDRVTASGDLETVGRHDCDGQVKSTTVAHPKVDPETGEFCGLSYGDLQ

SEQ ID NO: 114530 - protein, 70 aa, Gossypium hirsutum
  Clone ID: uC-gsflnu33B013c04b1.pep
FCNCSMFSFYFFIVLCAVFFFFIENRGALTQIHKQHQPLDDDHDKVSMINGHKLNTKEKLNKIHTPGKEK

SEQ ID NO: 114531 - protein, 62 aa, Gossypium hirsutum
  Clone ID: uC-gsflnu33B013c08b1.pep
KNSACIFVTISDPLGPHGNNVRWPTQNTLPSSIIRQLHCDSSPNDASHHEARLYLESKIMCL

SEQ ID NO: 114532 - protein, 54 aa, Gossypium hirsutum
  Clone ID: uC-gsflnu33B013d05b1.pep
AFSHPAPAASIPSSQDTGLYVGLNKVQGVTRKGWTRLLYHQHGSPRTVVRVMRN

SEQ ID NO: 114533 - protein, 63 aa, Gossypium hirsutum
  Clone ID: uC-gsflnu33B013d08b1.pep
PVLPVIMIQDLHCIQNLVLQYQIYSSRLIAPTDPSDNRNLVHNIVFRDFFLYKNLTHTVSPYE

SEQ ID NO: 114534 - protein, 60 aa, Gossypium hirsutum
  Clone ID: uC-gsflnu33B013e07b1.pep
PRVRPPVLCEIATMNKAQKRESVGDMNYTDCLDETAITPINVLEDPDNTLDTVHCDDRRC

SEQ ID NO: 114535 - protein, 65 aa, Gossypium hirsutum
  Clone ID: uC-gsflnu33B013e11b1.pep
LVFLNLVPLFFFFFFFFFFFFFFFFFFFFFFFFFFFFFFFFFFFFFFFKERCHTGYFIQIWKITS

SEQ ID NO: 114536 - protein, 48 aa, Gossypium hirsutum
  Clone ID: uC-gsflnu33B013f08b1.pep
LSGNTRCSVAVKANFLVAAVNFQSIKDIVNLDINLQKNFRLNRWPDAW

SEQ ID NO: 114537 - protein, 54 aa, Gossypium hirsutum
  Clone ID: uC-gsflnu33B018a12b1.pep
YNERYTTTTRNFQCISILVTMQGRLVLAPHLYLLTSYLHPIEEDYTGIEIMSKI

SEQ ID NO: 114538 - protein, 71 aa, Gossypium hirsutum
  Clone ID: uC-gsflnu33B018g04b1.pep
HAFAGNMPGLKPLHDGSHGYALEDTTNAGMSTGPHVNADGDEDGDTEDENHQAGDLGNVTGGDDGCSQPLH

SEQ ID NO: 114539 - protein, 57 aa, Gossypium hirsutum
  Clone ID: uC-gsflnu33B018g08b1.pep
GTPKKSHGIARTGTQDWIHQNARPIFNLLILFFFFFFFFFFFFFIFFFFFFYFLFFL

SEQ ID NO: 114540 - protein, 45 aa, Gossypium hirsutum
  Clone ID: uC-gsflnu33B019a09b1.pep
NRPPLFFYFFVFFFFFFFFFFFFFFVFFFFFFFFFLFFFFFFFFF

SEQ ID NO: 114541 - protein, 70 aa, Gossypium hirsutum
  Clone ID: uC-gsflnu33B019a12b1.pep
RKLMKKSKKYFKQFKIKKKKKKKKKKKKKKKKKKKKKKKKKKKKKKKKKKKNKLKPNEEKPTKVKKNKPY

SEQ ID NO: 114542 - protein, 55 aa, Gossypium hirsutum
  Clone ID: uC-gsflnu33B019c03b1.pep
SHQAQQTTNMRTNNWAIGSPHFNAPAVAFQGWDWKNFGGTQFNTLEGDNPFASRI

SEQ ID NO: 114543 - protein, 69 aa, Gossypium hirsutum
  Clone ID: uC-gsflnu33B019f06b1.pep
KKKKKKKEKFKKKKPKITIEKKGRNGAGAQEVRASPSGSVTLLGGSPEFPTFELSGPTLYTGKTGKTPT

SEQ ID NO: 114544 - protein, 86 aa, Gossypium hirsutum
  unsure (1)..(86): unsure at all Xaa locations
  Clone ID: uC-gsflnu33B022b12b1.pep
PALLSSPKSKLPXDPKAWSAGTATVRRVRYARCYHGIWVPYSCLPVFPTVTLFIVTYNICLFRPSHRTTFDDCGLRSLCGSSSKAR

SEQ ID NO: 114545 - protein, 70 aa, Gossypium hirsutum
  Clone ID: uC-gsflnu33B022e06b1.pep
AGHFLHKGSVHDGKGDCCGPCLYCAISSILIEFQCNKSGFRQGFPSRPVVTSGQCFEFRFHYRKAMTWHV

SEQ ID NO: 114546 - protein, 33 aa, Gossypium hirsutum
  Clone ID: uC-gsflnu33B023b10b1.pep
VIFLGNARRLLEMRCDGNSRLGRLCKLSLAPVL

SEQ ID NO: 114547 - protein, 79 aa, Gossypium hirsutum
  Clone ID: uC-gsflnu33B023b12b1.pep
LTRPLKITLYSFFFIFFVPFWAAFFSFFPIFSLLCASVGAISFQGDIKLQRISIYLFSSLIQSFSKSTRFDMEMENFLQ

SEQ ID NO: 114548 - protein, 50 aa, Gossypium hirsutum
  Clone ID: uC-gsflnu33B023c06b1.pep
KKDALQRTRKEARHRKKARPLKNGLPFFFFFFFFFFFFFFFFFFFFFFFY

SEQ ID NO: 114549 - protein, 113 aa, Gossypium hirsutum
  unsure (1)..(113): unsure at all Xaa locations
  Clone ID: uC-gsflnu33B023d04b1.pep
PLSQDWEXVVIKEKAHETXVTKKDDKVVIPDLRAGDLNGSVNKLNASTNMVALRRTTLNTRERDEETENIAHERWPPEPKKXVCMVEWGKKPPRGKLPQMIQKKASYYTKISN

SEQ ID NO: 114550 - protein, 37 aa, Gossypium hirsutum
  Clone ID: uC-gsflnu33B024f01b1.pep
MRQAAFALVLTAYAASISRALASALILSFSSISFVNS

SEQ ID NO: 114551 - protein, 47 aa, Gossypium hirsutum
  Clone ID: uC-gsflnu33B025a07b1.pep
GFNIYVGGGMGRTHRQETTFPRLGEQLGYLPHGVSSYLYLFLFYFSY

SEQ ID NO: 114552 - protein, 85 aa, Gossypium hirsutum
  Clone ID: uC-gsflnu33B025a08b1.pep
FRFHSNNQTWETVTPLFRCTLHRAQQPEHLLYLDTIRNASISSLLFSLLILFSFLLTIYPVFIPLTLLLILSLFSNSCPPRVALP

SEQ ID NO: 114553 - protein, 54 aa, Gossypium hirsutum
  unsure (1)..(54): unsure at all Xaa locations
  Clone ID: uC-gsflnu33B025c04b1.pep
GKCLRFSYSTLYFFFMSLKLYFLFIFLFFILIFICNFKLLFLHRLFEXPFSFIF

SEQ ID NO: 114554 - protein, 54 aa, Gossypium hirsutum
  Clone ID: uC-gsflnu33B025e11b1.pep
IPNVKVSCSREVVTFQHFNLYVSLSRRVLSVGVNKDVMSSDSCDCAYCVNFFDY

SEQ ID NO: 114555 - protein, 56 aa, Gossypium hirsutum
  Clone ID: uC-gsflnu33B049b10b1.pep
NLLIFYSNSKLKRAIYLPTSQSKPVWDEGVHRGPYQIWVNSHIDDFLRSHVWYSLF

SEQ ID NO: 114556 - protein, 41 aa, Gossypium hirsutum
  Clone ID: uC-gsflnu33B049c07b1.pep
RVLILISYNPNILKASTFSGIRAFLTSSCFSSVRFRVSLNF

SEQ ID NO: 114557 - protein, 76 aa, Gossypium hirsutum
  Clone ID: uC-gsflnu33B049c09b1.pep
SSLKTLRIVMLNILFSVLLINIISIHPLTTQSTCQILNRLHRIQAMDRIRTIVLPLISGTSLAAGCKLAKLKFLFL

SEQ ID NO: 114558 - protein, 100 aa, Gossypium hirsutum
  Clone ID: uC-gsflnu33B049d09b1.pep
RSRVRSPPPPELATCIEPPALPPSCVEYTLITLTMNSLHTMYVTFTRTLTNPLTFTSTTITYNRLLITKGHFHELSRVHTHKLLCHLCIDCFKKFPFYLD

SEQ ID NO: 114559 - protein, 167 aa, Gossypium hirsutum
  unsure (1)..(167): unsure at all Xaa locations
  Clone ID: uC-gsflnu33B049e10b1.pep
VTRAIRFKTEADHMDGLDPSRLIILQKERSXLNNXRTVGEQVIPFERNFKGADIESGHHITDRTVEMKAVTILATAVAKGSSSRPAKEETREYGTCREFMSNMSAAMRDQSGLISKPKPEENNINLAQVILLEEGKSHNDYLKGGTFVGLASTWRSKKSGFQNLKQY

SEQ ID NO: 114560 - protein, 43 aa, Gossypium hirsutum
  Clone ID: uC-gsflnu33B049e11b1.pep
TCSASGRPCSRQERSFRRTIRLIGSNLPTIVRLSFLPSRRHKI

SEQ ID NO: 114561 - protein, 57 aa, Gossypium hirsutum
  Clone ID: uC-gsflnu33B049f03b1.pep
WPTWLPSAPMWESSALPNKHPVAVPVLGRAGLHPMGFLKHKSMLSSLWMRVVMVLSR

SEQ ID NO: 114562 - protein, 53 aa, Gossypium hirsutum
  unsure (1)..(53): unsure at all Xaa locations
  Clone ID: uC-gsflnu33B049g01b1.pep
KGPPPSFFFSFRGRVGINDLSFCHFFYALVHASCGGIILNALPXTTIIYNLIK

SEQ ID NO: 114563 - protein, 78 aa, Gossypium hirsutum
  Clone ID: uC-gsflnu33B050b02b1.pep
KGSKPEEPPDKKGGNPGGGKEPRATKTTPRDPGISAPRRKERDAKTAPTKPSVPISCHFFSVFFFYLFSFFFFFFLFE

SEQ ID NO: 114564 - protein, 79 aa, Gossypium hirsutum
  Clone ID: uC-gsflnu33B050b04b1.pep
MIGHSKPTTIRGCRLSICSPFAYVGFGFGFIKLACFFFFFCFFFFFFFFFFFFFFFFFFFDSRYQLFRLLLRLRELYFA

SEQ ID NO: 114565 - protein, 66 aa, Gossypium hirsutum
  Clone ID: uC-gsflnu33B050h04b1.pep
KKSRWSQTAMAKKLAFFVLFNIRLFVGYLTPTSIKRQSNGNYGCRRTRDGHCRKMAEWDGRDPASA

SEQ ID NO: 114566 - protein, 92 aa, Gossypium hirsutum
  unsure (1)..(92): unsure at all Xaa locations
  Clone ID: uC-gsflnu33B051b02b1.pep
MRELLLHGHVYAIRKVWMGTPKQKWTVEEEAAYKAGVLKHWTGKGRIVLXDTEVRGDLRSGMNVDLKDKRRNINATAMWGSRQKAKLGLKRN

SEQ ID NO: 114567 - protein, 52 aa, Gossypium hirsutum
  Clone ID: uC-gsflnu33B051b05b1.pep
TRAAPLKFQFMGLSRFLSVPLTVYPSNKTILPVRFPPERPASVPHHVGMVGT

SEQ ID NO: 114568 - protein, 38 aa, Gossypium hirsutum
  Clone ID: uC-gsflnu33B051c08b1.pep
KWLRNHEEEWQRWLPGFTPSPFTCSFMLLHLRLMLPRL

SEQ ID NO: 114569 - protein, 57 aa, Gossypium hirsutum
  Clone ID: uC-gsflnu33B051d02b1.pep
PRVRCQHPSENWLCLSCKVVLCSRYVNKHMLEHYQLTTHLIALSFSDLSVWCFCLLI

SEQ ID NO: 114570 - protein, 71 aa, Gossypium hirsutum
  Clone ID: uC-gsflnu33B051e09b1.pep
HRGGKGKGRTPFRWRHLYVKAVGWELTAGPGIPHLGSSKDMGLSFSHWLVVFLIFCFFFFFFLLFFFFFFL

SEQ ID NO: 114571 - protein, 57 aa, Gossypium hirsutum
  Clone ID: uC-gsflnu33B051f09b1.pep
KKRINKPLQLHTYRTILRRNRFIITRFKFSLTNNNEITVKTNYRKEPKKSLPFLLRF

SEQ ID NO: 114572 - protein, 49 aa, Gossypium hirsutum
  Clone ID: uC-gsflnu33B051g12b1.pep
CDLYTNTVTWELHWCGCKQPRRSRNKTYWAHNSFCRVILLSLRSGPDAV

SEQ ID NO: 114573 - protein, 82 aa, Gossypium hirsutum
  unsure (1)..(82): unsure at all Xaa locations
  Clone ID: uC-gsflnu33B055a10b1.pep
TPLHSLHSRAQGASLEHARXTIGTATTTELEPVFTSDKSFAPATVANLGPGFDFLGAAGDGLGHIACLRIDPSVSPGHDTHL

SEQ ID NO: 114574 - protein, 58 aa, Gossypium hirsutum
  Clone ID: uC-gsflnu33B055b03b1.pep
FDDANDYTNFVLHKRLMSLIEDVEDFSPNLMHRRSTKDQEAEPYSIKGMSYGGGGIPR

SEQ ID NO: 114575 - protein, 38 aa, Gossypium hirsutum
  Clone ID: uC-gsflnu33B055b12b1.pep
KSSPIRQTDDSIQRASFAQHLRRHVDPNANVWAIFGGF

SEQ ID NO: 114576 - protein, 48 aa, Gossypium hirsutum
  Clone ID: uC-gsflnu33B055c04b1.pep
TIRVVTCFSNEHHPLETNNNFHRLRPEFLVHHGNLHYHLLLHGPVYPL

SEQ ID NO: 114577 - protein, 91 aa, Gossypium hirsutum
  unsure (1)..(91): unsure at all Xaa locations
  Clone ID: uC-gsflnu33B055c09b1.pep
LTTQPRHKTTPEGAPLGGGPLVXLAHEAKYIQGKYHTNPHVRLSFRGEERKTKRAKNSKDPRWAQETQPMVDEPPXNDKNHIKAFSTTYKE

SEQ ID NO: 114578 - protein, 73 aa, Gossypium hirsutum
  Clone ID: uC-gsflnu33B055e06b1.pep
ASATGGVPLAILAAQLLVLALGVALFAITPSVEGPMSISANKLGHEWVFTVTTLLSAGQSMVSRWLYIITITS

SEQ ID NO: 114579 - protein, 52 aa, Gossypium hirsutum
  Clone ID: uC-gsflnu33B056d07b1.pep
STRPPTRPPTRPGSGGGYMGSGYGDVNGSLPYGIAWFYYILSKVLLNLPFSL

SEQ ID NO: 114580 - protein, 64 aa, Gossypium hirsutum
  Clone ID: uC-gsflnu33B056f02b1.pep
AQVKALVTKLPGSEMVGKGSTAWFCMPSNLKLTAAHALSVSCERFAFTLFLYFYFCFFFSFFFY

SEQ ID NO: 114581 - protein, 70 aa, Gossypium hirsutum
  Clone ID: uC-gsflnu33B056g02b1.pep
STRPQDLHSQRQALLHANNTLHGVDDNIGKSKRILTAMSRRMNRNKWIIGIIIAVLIITIAAVLYFKRVK

SEQ ID NO: 114582 - protein, 58 aa, Gossypium hirsutum
  Clone ID: uC-gsflnu33B056g10b1.pep
YACLYCFLHRFLYGHDYDQSSINQCDPLRLSLFLSVNVTIHPHAFAFAVIPDPESDII

SEQ ID NO: 114583 - protein, 77 aa, Gossypium hirsutum
  Clone ID: uC-gsflnu33B057g02b1.pep
RRGPYYITPTWGKKGKRPPKDLNGVPPRFPPTTGVKTTAQVFEFGAPLKKNKHRATPRMKTGPPKTPPPRFKGHLQT

SEQ ID NO: 114584 - protein, 72 aa, Gossypium hirsutum
  unsure (1)..(72): unsure at all Xaa locations
  Clone ID: uC-gsflnu33B058c04b1.pep
LFVKRNPVFGGTTTALYGDRVWGLXHVVTMINMVRHYLLYDDLLADVREDARPYGGLTCEEQNIITASTSYA

SEQ ID NO: 114585 - protein, 63 aa, Gossypium hirsutum
  Clone ID: uC-gsflnu33B058h06b1.pep
KRHFSAIGSILFRLVAFCPHLWTSFYTGRITSRFSRRGVHAPKSFLSLGFVGIRSRHNLRITS

SEQ ID NO: 114586 - protein, 48 aa, Gossypium hirsutum
  Clone ID: uC-gsflnu33B060b04b1.pep
SGFSVDGGGKGGIRFRRRASACTIREGSSLQLYDIIAGRVIENYTWNC

SEQ ID NO: 114587 - protein, 80 aa, Gossypium hirsutum
  Clone ID: uC-gsflnu33B060d09b1.pep
LNTGPQVWLPMVHFPLAIRCHHFRALRPVFMHRAMSSSFSNGEQGVRPPFTSLPPLYASYRCPLLWFYPYNLCLLLVHIS

SEQ ID NO: 114588 - protein, 58 aa, Gossypium hirsutum
  Clone ID: uC-gsflnu33B060e03b1.pep
SIHVISADVAPVSPSDQGASVTLLRALYTVRSVSVAARARHGACAVICLKCENLAFLS

SEQ ID NO: 114589 - protein, 89 aa, Gossypium hirsutum
  Clone ID: uC-gsflnu33B060f06b1.pep
MHRSSSSSRVSDEFFLNASPPQSVGSKQPSSETVPLNPQELPMYNPLSAAAKKERSRLRSAENAIHIIPLVLVLCAIILWFFSSPESRV

SEQ ID NO: 114590 - protein, 41 aa, Gossypium hirsutum
  Clone ID: uC-gsflnu33B060f08b1.pep
GLGFYQAYADLYLLEHECLALSHPHLHLISFYQFSAATLCS

SEQ ID NO: 114591 - protein, 53 aa, Gossypium hirsutum
  Clone ID: uC-gsflnu33B060g03b1.pep
SVLIEPTSDPLASSKLSQSAKGGLSHVLDDVCQHLHHHSLQMTEPGQSSRTCN

SEQ ID NO: 114592 - protein, 87 aa, Gossypium hirsutum
  Clone ID: uC-gsflnu33B061a03b1.pep
FSFPFLFLLPSFAPMTAPPGLAPRVLRRPPPPPTHRGLALAPTAGSRSRVFAPPIGWKGLVGLISCFRSLSDWVTRTRERPGIRAGP

SEQ ID NO: 114593 - protein, 80 aa, Gossypium hirsutum
  Clone ID: uC-gsflnu33B061g08b1.pep
LEITSHHRFLNVSSFIHGVALWHVRMAMIRVTIVPGLRSIHLTIVIINNQFISSFFKQETFRKSVNGSSRSRHECGSILV

SEQ ID NO: 114594 - protein, 61 aa, Gossypium hirsutum
  Clone ID: uC-gsflnu33B062a12b1.pep
GMTQVDPLDAPERQCSHLNSTARGVMGGSTDTDHANTVDLMTNVLGPTYYCIRFPWKNMLL

SEQ ID NO: 114595 - protein, 35 aa, Gossypium hirsutum
  Clone ID: uC-gsflnu33B062g08b1.pep
GSQFRCLVASITDSTNQPLFPLSDLQGVDQLFRLQ

SEQ ID NO: 114596 - protein, 47 aa, Gossypium hirsutum
  Clone ID: uC-gsflnu33B062g12b1.pep
LSVARIGGQTALMTALSEFLVIHLGGEKTQVLPLNIKLDSLSGDSDS

SEQ ID NO: 114597 - protein, 49 aa, Gossypium hirsutum
  Clone ID: uC-gsflnu33B063c09b1.pep
IGGLVLILTVWTSIFVAKNRSCKLKASSGQQKKKKKKKKKKKKKKKTKP

SEQ ID NO: 114598 - protein, 69 aa, Gossypium hirsutum
  Clone ID: uC-gsflnu33B063e02b1.pep
SLSMFLVTVSDDPRTSWVLALTISMGWSLWNTHSRHHHSKRFNPRPDSIRRSLLSTASFSFLTVKHRSY

SEQ ID NO: 114599 - protein, 45 aa, Gossypium hirsutum
  Clone ID: uC-gsflnu33B064a03b1.pep
LSWQDHQTIWHTHERSRDQLWNSSYVAPSLSASHLRLDDPVCILT

SEQ ID NO: 114600 - protein, 99 aa, Gossypium hirsutum
  unsure (1)..(99): unsure at all Xaa locations
  Clone ID: uC-gsflnu33B064a04b1.pep
TDIFEAKDQNGGVPDPAQVVDQGQVMEWMPESCMARATSNQTQEAAHEAWMKRVTIASKHSEYEHGAADLVMHHXDERSMVDQKNLADIELAEFGSREP

SEQ ID NO: 114601 - protein, 69 aa, Gossypium hirsutum
  Clone ID: uC-gsflnu33B064a09b1.pep
GRVPLSIQSGRLSVSTTGSGLMAMSPSVVKGHVFQAVLAGLLQGFPSRDVVRARTVHLFYVALYKSYVV

SEQ ID NO: 114602 - protein, 55 aa, Gossypium hirsutum
  Clone ID: uC-gsflnu33B064b10b1.pep
KCTELLKIWGGPFKGIQVCLRWLERAYSFFWGPLIKINGPRVYPGVMGKTWGSPN

SEQ ID NO: 114603 - protein, 107 aa, Gossypium hirsutum
  unsure (1)..(107): unsure at all Xaa locations
  Clone ID: uC-gsflnu33B064e10b1.pep
MLMHEALQRWISTIMYPDGSSSSPAPILQGITIYVYENGPRLAEASRNTNRTAILWTRTGSPLRAVRGMSDGTIAFLTSTGLLAFMLXFIAPTVDAVIIFYLIAQAA

SEQ ID NO: 114604 - protein, 72 aa, Gossypium hirsutum
  Clone ID: uC-gsflnu33B064h02b1.pep
SQKMGSSLSLSNTYRHFGILSSSCFSFFKQSMVWALPFPIMSRHPSSTPHTSLHHCILSQLHQLFLYTKTPA

SEQ ID NO: 114605 - protein, 50 aa, Gossypium hirsutum
  Clone ID: uC-gsflnu33B064h12b1.pep
ASETPNYIIFLVLFHNFSISKLISPKAMVSIHEFIWYYPMRWKNRLNPSL

SEQ ID NO: 114606 - protein, 40 aa, Gossypium hirsutum
  Clone ID: uC-gsflnu33B066d07b1.pep
NAPGEDHLAWGLYHDSSESLLSCSLMIFRVLTASITVYTS

SEQ ID NO: 114607 - protein, 50 aa, Gossypium hirsutum
  Clone ID: uC-gsflnu33B066h05b1.pep
DGRPFFDNDVRAMCSHFFYLSLVLELYLSSIILLQNKKTKSPINTSYYNH

SEQ ID NO: 114608 - protein, 52 aa, Gossypium hirsutum
  Clone ID: uC-gsflnu33B068b01b1.pep
LSMNWLHASLTAVARLSRASLIDSGIQVLIQYVRISGPLTDIFLRSTWKMMV

SEQ ID NO: 114609 - protein, 71 aa, Gossypium hirsutum
  Clone ID: uC-gsflnu33B068c10b1.pep
KGGTDYVLYHKGQPLANISLQIPGAHNVLNSLAVIATGTVLLQGRRQVHELINSLKLHKLVPNAPPSPLCE

SEQ ID NO: 114610 - protein, 75 aa, Gossypium hirsutum
  Clone ID: uC-gsflnu33B070f03b1.pep
LVHETIQSSVGAEGFWSYYPYGTTVSIIITVLAMVLGHYNGPSLFFFLSFRLFLFPSIMSPHNPHHLGNPPPHNT

SEQ ID NO: 114611 - protein, 53 aa, Gossypium hirsutum
  Clone ID: uC-gsflnu33B070f11b1.pep
FRLCHSMLEYNQEFNACVSLNKECQQPCIRHQKPSSESLRAWQNRQLHPQPSV

SEQ ID NO: 114612 - protein, 67 aa, Gossypium hirsutum
  Clone ID: uC-gsflnu33B070g09b1.pep
SFYWAPNYTSLAGESQGLPMVKPRGSPPSFRPGRPSPLLGAGGLPFRPVPHRCLQHGTRPNGARYAP

SEQ ID NO: 114613 - protein, 127 aa, Gossypium hirsutum
  Clone ID: uC-gsflnu33B072b11b1.pep
MGMRRREMGFYFLAFLWFWVPINGLLSPKGVNYEVQALMAIKDALHDPHGVLDNWDGDAVDPCSWAMVTCSPESLVIGLGSPSQNLSGTLSSSIVNLTYLRIVLVQNNNITGPIPSDLGKLSKIQHL

SEQ ID NO: 114614 - protein, 79 aa, Gossypium hirsutum
  Clone ID: uC-gsflnu33B072d01b1.pep
HTHTQLIRSYELTKITTSYYIDPFGDSSPPIVKPPTPVIVKPPLPDTPCTTPPLFGTTNMPNRHFKAMCMCQRFGWLST

SEQ ID NO: 114615 - protein, 137 aa, Gossypium hirsutum
  unsure (1)..(137): unsure at all Xaa locations
  Clone ID: uC-gsflnu33B072d05b1.pep
KGTPWGKPPTPPPLKPPQRGGPHPHSGXPTFWKGQSDGAPLELPPPAKRGCSSRTLNLGTPGFFPAPPWKTAAREINLRGPNKKLSLRKPGEVNLGPPKRPPLFFFFFFFFFFFFFFFFFFFVVFSIFCYHFKIMIL

SEQ ID NO: 114616 - protein, 65 aa, Gossypium hirsutum
  Clone ID: uC-gsflnu33B072d10b1.pep
IKFPQKKTKTFPGPARKLRFPKKTPPPFFFFFFYFFFFLFFFFFFFFFFFFYFFFFFFFFFRTRE

SEQ ID NO: 114617 - protein, 113 aa, Gossypium hirsutum
  unsure (1)..(113): unsure at all Xaa locations
  Clone ID: uC-gsflnu33B072g03b1.pep
MARGRAQSKSYKRSSLGEEWKKPFAGCLHAKGIGLEKRGIEANXPNSALRKCAXVQWINNGKKSDRIDSNDGXXNYIAYNDHGLTALFGRKGHADCEIPGGRDKDAKVLGGSL

SEQ ID NO: 114618 - protein, 98 aa, Gossypium hirsutum
  Clone ID: uC-gsflnu33B072h05b1.pep
PNAIQDEQWMGKATGPGQTDVHPPNERGTGATQSRRGTPRCAQSNSCKTEARANPTRGPTEDLVLLYAVRTACCVLIYLCLSLLIFFFFFFFFFLFYY

SEQ ID NO: 114619 - protein, 43 aa, Gossypium hirsutum
  Clone ID: uC-gsflnu33B073a02b1.pep
FTAQKEVVCHSLQAHIDEGLPYGRFSQAFDSQSKRNAAKPTGH

SEQ ID NO: 114620 - protein, 44 aa, Gossypium hirsutum
  Clone ID: uC-gsflnu33B073a04b1.pep
FDDLTNTPTLKLPLVLKKIPQPLIKINASQLIISIDKYLNIVHR

SEQ ID NO: 114621 - protein, 36 aa, Gossypium hirsutum
  Clone ID: uC-gsflnu33B073c03b1.pep
DCLTFTLSHNCWCLHVMQRRSYNLYSLLDGAGLIYI

SEQ ID NO: 114622 - protein, 70 aa, Gossypium hirsutum
  Clone ID: uC-gsflnu33B073d12b1.pep
DDDAYDHSYGAVTPRFSFSDGREPEHSMDVLALIVDFLLVFMGGGGVIHFRLEKTPVPPTTMTDRSWLKT

SEQ ID NO: 114623 - protein, 50 aa, Gossypium hirsutum
  Clone ID: uC-gsflnu33B073e01b1.pep
FLLLDGVEPVVSACVFWRETLVTLDPRNWCWLNIWGFRPQFNRLRLSNIK

SEQ ID NO: 114624 - protein, 70 aa, Gossypium hirsutum
  Clone ID: uC-gsflnu33B073e08b1.pep
KLIVLYLSSSVPIMLVIMIIKQRLLRTKPYNHPTLVLFLFFFFSLKISLFSLSLDSVFATEIASRRGEYK

SEQ ID NO: 114625 - protein, 47 aa, Gossypium hirsutum
  Clone ID: uC-gsflnu33B073f04b1.pep
SEVRDALTRSLDMVIIVPSLRIAITLSIKGGNVYSHVCTRSIRTYLL

SEQ ID NO: 114626 - protein, 49 aa, Gossypium hirsutum
  Clone ID: uC-gsflnu33B073f05b1.pep
NGTEKLFMIHIHAFLGYSLLVEFDGSIYMYIFSYIKINIIAGLWLKKKI

SEQ ID NO: 114627 - protein, 52 aa, Gossypium hirsutum
  Clone ID: uC-gsflnu33B073f10b1.pep
SVEEKKRKEEEERGRRKGNLYTDRIPDRNRRLTRKLITAKGTRSSKYENISL

SEQ ID NO: 114628 - protein, 79 aa, Gossypium hirsutum
  Clone ID: uC-gsflnu33B073f12b1.pep
TFFWIVFCLLNFSGNQGGGNSLINPIAWKVSCLGTLFGGCPKNQKLAVQVVESIKMPLEVPQFEWDNYFGRPKIQLFLT

SEQ ID NO: 114629 - protein, 70 aa, Gossypium hirsutum
  Clone ID: uC-gsflnu33B073h02b1.pep
LLVRKNHAPRICQISTLTIKIRSMKKLYRRGMGHPSPSITTYSSSFPPGYQYKPLLVALSSEDKQGLGLF

SEQ ID NO: 114630 - protein, 53 aa, Gossypium hirsutum
  Clone ID: uC-gsflnu33B074a01b1.pep
GSGSDKVMIIVEAARAQQNESCRYSLIILTQLYKYPDVAQSSSLYRDWGKVSK

SEQ ID NO: 114631 - protein, 38 aa, Gossypium hirsutum
  Clone ID: uC-gsflnu33B074b10b1.pep
KDQQVRAFLVLSPLAKSRFYCRRFMVGRAKVFPVKTFL

SEQ ID NO: 114632 - protein, 73 aa, Gossypium hirsutum
  Clone ID: uC-gsflnu33B075c10b1.pep
GAVTRAVEVVVLVVMVVRALVFNFCISSSFSYLQSSYYVRSEICFAIASRFSSPSTGFKACVSQCVRAHRRQR

SEQ ID NO: 114633 - protein, 71 aa, Gossypium hirsutum
  Clone ID: uC-gsflnu33B075f09b1.pep
GMHSTNVIILYCDSNKHYNFDTPSKSQFSMAMKVYHSKEFFTTQYNHSFLKGGEQVESIRLKTWNKPHVLH

SEQ ID NO: 114634 - protein, 57 aa, Gossypium hirsutum
  Clone ID: uC-gsflnu33B075h07b1.pep
ETRNKKWGSINIDMGEELTAPRPCTAPLRPTAPDHSPSPPSPLCAPIHHPPLPDCPS

SEQ ID NO: 114635 - protein, 58 aa, Gossypium hirsutum
  Clone ID: uC-gsflnu33B076b08b1.pep
TNHSLPIFFLLFPNACLQKNNTQHVISRYLIILIPKFNIVVLWKPLPNHKLCVLGLRG

SEQ ID NO: 114636 - protein, 78 aa, Gossypium hirsutum
  Clone ID: uC-gsflnu33B076b11b1.pep
LGRSRPLFALFLLLVAGSAGFGSSCAPAVLLPLGVASLPWWRVVLPWFCSLTPPKVRLVVWVTIRVVWSPQFFRPGPR

SEQ ID NO: 114637 - protein, 39 aa, Gossypium hirsutum
  Clone ID: uC-gsflnu33B076b12b1.pep
VPGRSFFGRPHAAGGMLVEDRIIAGCFFIKPEKHHMSPM

SEQ ID NO: 114638 - protein, 35 aa, Gossypium hirsutum
  Clone ID: uC-gsflnu33B076d09b1.pep
RPVESSCKTLSSKCVCGCLFKITHPRSPIPGDSLG

SEQ ID NO: 114639 - protein, 100 aa, Gossypium hirsutum
  unsure (1)..(100): unsure at all Xaa locations
  Clone ID: uC-gsflnu33B076g02b1.pep
RLKDETEGYKPGQNRPDDRGAALVVVPSIHPAGVQHHSSTIGQPKINLLAVVXKGRDGENPGVTKFKRLEEKPLFACWNNTKKARTDRPSKQLSNPEWLM

SEQ ID NO: 114640 - protein, 48 aa, Gossypium hirsutum
  Clone ID: uC-gsflnu33B076h04b1.pep
FMVALAPTASIGSQHCRALTVPELTHQMWDAKNMMCAADPRHGRNLTA

SEQ ID NO: 114641 - protein, 74 aa, Gossypium hirsutum
  Clone ID: uC-gsflnu33B076h11b1.pep
LFDADRVDGFSGSGLNCCVLSCPCCYFSEFLLIFSSFLTPGYFIDFPSYVRFYIILYFLAILYSLSFFFFHVFF

SEQ ID NO: 114642 - protein, 95 aa, Gossypium hirsutum
  unsure (1)..(95): unsure at all Xaa locations
  Clone ID: uC-gsflnu33B077d02b1.pep
MEAEGGVMILMYLFETHLDLRQHADLXVPTLTKTLEGVSHPXKFEKSXRPIALDKSHFHMVHEFVTIRIDSALXFIGILPWIWKKSGTYLPLLGL

SEQ ID NO: 114643 - protein, 45 aa, Gossypium hirsutum
  Clone ID: uC-gsflnu33B077d06b1.pep
APLAEELGTGQSLRTLLLVSFFYADGDRFSSWAPYSSLAVTRGFS

SEQ ID NO: 114644 - protein, 101 aa, Gossypium hirsutum
  Clone ID: uC-gsflnu33B079c01b1.pep
VRRPHAYGLGESFCAQVTESPNCRRCTTGHSEHRMHMKLQQRRQKRPLNEQTITMTWILTSMGGRAAQEDQGTGNSGPGTASPVQRRRASERRMMQKATKG

SEQ ID NO: 114645 - protein, 88 aa, Gossypium hirsutum
  unsure (1)..(88): unsure at all Xaa locations
  Clone ID: uC-gsflnu33B079d04b1.pep
VTRAAILRNTVAAEKRGSXSTPQDKPKIEHALVESRQWLDCCQLTEADESLDQMQELVSACNPITDKMHHAAGDHMVEIMDEDASSLG

SEQ ID NO: 114646 - protein, 75 aa, Gossypium hirsutum
  Clone ID: uC-gsflnu33B079e04b1.pep
QGKASMQRRLNPMLSRQFWLEYQYNRDCNPSGADPGLVIDVWTDIGATSPGRSRNRRWSSGLRTHAADSVGANIS

SEQ ID NO: 114647 - protein, 60 aa, Gossypium hirsutum
  Clone ID: uC-gsflnu33B079e10b1.pep
MGDQMHGPVWLMVGNKGKPFWAIISLQLEYAGRYIISWVSLRHGWSNFILGTYRHVVATI

SEQ ID NO: 114648 - protein, 57 aa, Gossypium hirsutum
  Clone ID: uC-gsflnu33B079h08b1.pep
YRARISWSAHTRPSCRQANIYLYCELLGDQGPMGGTVFCTTLGVPRIAVYPKLPRVR

SEQ ID NO: 114649 - protein, 95 aa, Gossypium hirsutum
  Clone ID: uC-gsflnu33B088d11b1.pep
IYVTSITRWKKGFISQIILSFPIAVVTGRKTPAERTKNGISDTKTYHYHLNLGGSVPTKRLTRLPSISKNDPKSTGHVGIHSSGSRNFLLKPEPL

SEQ ID NO: 114650 - protein, 102 aa, Gossypium hirsutum
  Clone ID: uC-gsflnu33B088g02b1.pep
LLCGDLYRELHLSLYQKPTDGGLAETNRTLGEEEEEYFKAVVDAPTGGMVYPPFRSHRGLFSGGTGRDAPILNGGLLPIALDLAEFSYDREATAVIPLDAAC

SEQ ID NO: 114651 - protein, 64 aa, Gossypium hirsutum
  Clone ID: uC-gsflnu33B088g08b1.pep
YLHLQQLAKPGLGLILRSHLRSVLTWADIKCTDVIYGPAYDRFYIRPPIWTQCSTRSRSSRHFR

SEQ ID NO: 114652 - protein, 53 aa, Gossypium hirsutum
  Clone ID: uC-gsflnu33B088g09b1.pep
WASNLVLNRCHGYFSRPRYRLKVRSLGVLISLNFCYMNKETSRILRSTWNEGS

SEQ ID NO: 114653 - protein, 144 aa, Gossypium hirsutum
  unsure (1)..(144): unsure at all Xaa locations
  Clone ID: uC-gsflnu33B088g12b1.pep
YYADGLDDKRLKEFTYQHSIITICKVMLEXLGIRIRSWNVALQTPEDAXIACADMNGNMAVSKPLYVALDXRKVEWRARLQAQFIXMRPGTMSLLVASRLPMYSPGGPGLGPYIFYGQAPSSIVFAALYLGFNSMLDPGLRPGG

SEQ ID NO: 114654 - protein, 52 aa, Gossypium hirsutum
  Clone ID: uC-gsflnu33B088h08b1.pep
VDCLIPSLLFWCNGSFLVVELKMHINYNVCNAFDHVVILLTRNNHSRDMTLG

SEQ ID NO: 114655 - protein, 46 aa, Gossypium hirsutum
  Clone ID: uC-gsflnu33B089h04b1.pep
FANIKVFNSPPRQGCNWGWKYSHSLIIMTYNSKINAIIHLGPHVMY

SEQ ID NO: 114656 - protein, 61 aa, Gossypium hirsutum
  Clone ID: uC-gsflnu33B090b10b1.pep
FGEDPFPIPHAKVLVKTFGAGLCCNRPRWGRGDSCSRDKDQGLSVGFPVKRYVEFWPVNCI

SEQ ID NO: 114657 - protein, 67 aa, Gossypium hirsutum
  Clone ID: uC-gsflnu33B090d01b1.pep
NMIPRINRAILLIPRLYQLGSRCAWNHEQPYPHRLASFMAPSAGIVPSGFACNNAPNCGRSCWPMYG

SEQ ID NO: 114658 - protein, 57 aa, Gossypium hirsutum
  Clone ID: uC-gsflnu33B090e07b1.pep
PRVRVAVKDLKRGFDALNSKDDPAKEAANFTLHVFILNHPGQIGNGYSLLLFCHTFH

SEQ ID NO: 114659 - protein, 72 aa, Gossypium hirsutum
  Clone ID: uC-gsflnu33B090h06b1.pep
GLSFSLMVVFLLWGLIFRLPFLLGPGVIHADVRGYGFSISSVVCMYACLCAGMPARMVSGRKAVYMIRLILV

SEQ ID NO: 114660 - protein, 42 aa, Gossypium hirsutum
  unsure (1)..(42): unsure at all Xaa locations
  Clone ID: uC-gsflnu33B090h08b1.pep
FPFSGLLTANVVAVFRMRISVNSSLRPRLQSSFTRSRVSAXD

SEQ ID NO: 114661 - protein, 57 aa, Gossypium hirsutum
  Clone ID: uC-gsflnu33B091b06b1.pep
WGVFFIFMRLTKLLLKLEMTGGTASKRNEHNGTAQARLNHKKKACRYHNKEIYHKDP

SEQ ID NO: 114662 - protein, 93 aa, Gossypium hirsutum
  Clone ID: uC-gsflnu33B091c06b1.pep
AFSWGCLWVKSKPAVVPAFSARTESETRISTNSKDSARPRSASGEHQYTTAPSCFPHSQKSQKGHGLIPTKRVKEPQKTSSGTQVSSNKGQRF

SEQ ID NO: 114663 - protein, 98 aa, Gossypium hirsutum
  Clone ID: uC-gsflnu33B091e12b1.pep
WCGSNPSYVVYASYWNPCTSLASSVPASSRSLHRQCGHGVLYCIRLWARPWGFFPSPCLAPLGVCPLPGLARPFVPCSFPLRGSCSFSLWTLITGGLG

SEQ ID NO: 114664 - protein, 48 aa, Gossypium hirsutum
  Clone ID: uC-gsflnu33B091g08b1.pep
LCLVRDVFSLLIGHMVHSSASCAAALVLEKGVDSGAFMGVRLKARQWF

SEQ ID NO: 114665 - protein, 49 aa, Gossypium hirsutum
  Clone ID: uC-gsflnu33B091g12b1.pep
MRTPNPSLIRALTEIQLIGLAPAIDTLLASSMLAESTIYIDHQVLHPPC

SEQ ID NO: 114666 - protein, 41 aa, Gossypium hirsutum
  Clone ID: uC-gsflnu33B092a12b1.pep
HSTFVTSACFRLRVCIKQIGPSCSHTSFCPCLCMHMFVGNT

SEQ ID NO: 114667 - protein, 57 aa, Gossypium hirsutum
  Clone ID: uC-gsflnu33B092b07b1.pep
VPMPVGLAIGLAELVTLPITGTGTNPGSNLGGAIIVNMNKGWDKPWNDHGVPWMGPF

SEQ ID NO: 114668 - protein, 63 aa, Gossypium hirsutum
  Clone ID: uC-gsflnu33B092d04b1.pep
ACNSLASYPASAAMSRIALIILPERPHLCIKLSPFIPSVSPYPSPCSPLDLSSLSETDTNYLA

SEQ ID NO: 114669 - protein, 78 aa, Gossypium hirsutum
  Clone ID: uC-gsflnu33B092d05b1.pep
GREQHSPPSHKVGQRPPMKQTQVTRKDSSSAATKPGKARNPHTGNPLFFFLFFFLFFLSFIFFKSLKTKMQEIIDKQY

SEQ ID NO: 114670 - protein, 35 aa, Gossypium hirsutum
  unsure (1)..(35): unsure at all Xaa locations
  Clone ID: uC-gsflnu33B092d06b1.pep
AXLNLIKEDKVVWKMALLIAVRTLGMLVSESTYQP

SEQ ID NO: 114671 - protein, 82 aa, Gossypium hirsutum
  Clone ID: uC-gsflnu33B092g07b1.pep
VVSCTSTVGDYEGGERSSKNKGGLGLCKRHTLSSKEGSQFESRSPSLFSIKEASSAFWSSFLSPGSFIISSFSASKNSPSVS

SEQ ID NO: 114672 - protein, 46 aa, Gossypium hirsutum
  Clone ID: uC-gsflnu33B092h01b1.pep
EQSMSSQSEPSKGITRPIITLRSHGPGSSTKLGTLSPLNLRTQGND

SEQ ID NO: 114673 - protein, 64 aa, Gossypium hirsutum
  Clone ID: uC-gsflnu33B094b04b1.pep
MLCCEDLPCYDQLSIVICLQDFHFRWSITCHGQSIFYQDNNELMGYPYQFLKKPPAWESYHPDA

SEQ ID NO: 114674 - protein, 70 aa, Gossypium hirsutum
  Clone ID: uC-gsflnu33B094b09b1.pep
TQKGDRSLELFLKKPVLVTHPRLRSCKLLPTFPLINATYGSRHQTTLSETDGSTPKNPTTTHHLQPHKTP

SEQ ID NO: 114675 - protein, 90 aa, Gossypium hirsutum
  Clone ID: uC-gsflnu33B094c01b1.pep
TQIPTTYPTDSQTTAQPFYKQLWALHFPNKIKLLAWKVSWNFIPTMVNLHQRRVAPNAICPRCRAGTETLRRVFVECPGFSIIVWKHNAD

SEQ ID NO: 114676 - protein, 56 aa, Gossypium hirsutum
  Clone ID: uC-gsflnu33B094d09b1.pep
VHAYAPSRTHGAMINNCWVYAKGRSMEPELGLEPMISTSQEYHSPDTPIYRRQPDA

SEQ ID NO: 114677 - protein, 97 aa, Gossypium hirsutum
  Clone ID: uC-gsflnu33B094d11b1.pep
PRVRRNVVTWTTMINGYLKMGYLIDGFGLFSAMRKEEGVLVNSTTMTVLFEVCGHFDRCLWLTFNLFWIGFFYVLIFYSVYPVFWVLLSIFTSIRPS

SEQ ID NO: 114678 - protein, 104 aa, Gossypium hirsutum
  Clone ID: uC-gsflnu33B094e03b1.pep
ASYSYGYTEYTGGDFLGALTVLEQKGKLAIFKGTLTDDEGDKVLCVIIYRIGFQRQGNIWPIDHQNFNDQQPDGNLICAEKPNLMEFFTQLFPGTRLVPLLAFL

SEQ ID NO: 114679 - protein, 75 aa, Gossypium hirsutum
  Clone ID: uC-gsflnu33B094f09b1.pep
TTQIRLTKGNPISGGGPSKKTQLILPDHAEGEAFKSGYQKSPKGPPFYNIRDWEKPRLPQNNPLGNKPPLFPRCL

SEQ ID NO: 114680 - protein, 47 aa, Gossypium hirsutum
  Clone ID: uC-gsflnu33B095a01b1.pep
IYHSTAFYTSHLFHSLILNYPERPVFAGTHNPPACTVHRELEDKSSR

SEQ ID NO: 114681 - protein, 50 aa, Gossypium hirsutum
  Clone ID: uC-gsflnu33B095a03b1.pep
LVALLVLRCWLWGLRTKLICAELLPYLLTAHQLHSDLISSRMTIARFYSS

SEQ ID NO: 114682 - protein, 48 aa, Gossypium hirsutum
  Clone ID: uC-gsflnu33B095a05b1.pep
VFVAFSFSLKKKRLSKYALKRNFIHTNYCISTPHLDSHFIFVKREFGR

SEQ ID NO: 114683 - protein, 84 aa, Gossypium hirsutum
  Clone ID: uC-gsflnu33B095b11b1.pep
SPGYGLTKRPTWLTTTTLDHPLPAHCTDLLSVLSRIKSFNFSTYRVPVYNPDIADDSTAYRLERTPSVMNELSPLTFTVLLSNP

SEQ ID NO: 114684 - protein, 120 aa, Gossypium hirsutum
  Clone ID: uC-gsflnu33B095d11b1.pep
KKKKNKKQERFKKTKKWEKKKEGPPQRQPPPSAAGHSDNSLFGAALFVPFARRRPPRLAFSFPGFPLLSRLGVSPPLGGCLFTHVVPPSVALSPLCPYLVIQRAPPFSPLSPLPLGVLPL

SEQ ID NO: 114685 - protein, 26 aa, Gossypium hirsutum
  Clone ID: uC-gsflnu33B095e02b1.pep
MARKESLSISLNDVNPFLCNSKAHSK

SEQ ID NO: 114686 - protein, 73 aa, Gossypium hirsutum
  Clone ID: uC-gsflnu33B095e08b1.pep
VATAAVIPCVIPGSTSGHRFHQWLDHSSARSHSCEQSRHQDGHQCLARSLRTRLRTWPWKWFVRWLRCSFGQA

SEQ ID NO: 114687 - protein, 27 aa, Gossypium hirsutum
  Clone ID: uC-gsflnu33B095g10b1.pep
YHKKVLCFSSNIFGSLNFSVPYLTQIN

SEQ ID NO: 114688 - protein, 107 aa, Gossypium hirsutum
  Clone ID: uC-gsflnu33B097a01b1.pep
YKKKKKKKKKGGIILKKRGQKKKKKKGGHPYGAPLLEAPSFRPRACDVLPLLLGPPLAIHRAGFFQPRAWQTHGLSHLIRLWTDPLFACGRNPKRVPPVGPSQLLTG

SEQ ID NO: 114689 - protein, 45 aa, Gossypium hirsutum
  Clone ID: uC-gsflnu33B097b02b1.pep
IILVTGASPERGLASAFEVEPPPVPALRGRFAWSGLRGSHPGTFR

SEQ ID NO: 114690 - protein, 139 aa, Gossypium hirsutum
  Clone ID: uC-gsflnu33B097d03b1.pep
TGTKKEQQKKKEREEKKGERHKKGREKKKKNRKQHPTQRNQEPGEVNTSTTRTKTADKRRGPKPKQANKRTGKTNRQAPNTRTTSWRKENVSQSKKGRHHPGYPSQNDAKQRPEQRIKVALDKRKKVASTRNGSCVPLY

SEQ ID NO: 114691 - protein, 36 aa, Gossypium hirsutum
  Clone ID: uC-gsflnu33B097f01b1.pep
SISAGQGGVPHLSWFWFIRLGQMLDCFLLLSFREFF

SEQ ID NO: 114692 - protein, 63 aa, Gossypium hirsutum
  Clone ID: uC-gsflnu33B097f12b1.pep
SSDIVCSSWMDWFHGGLQSQIEHHLFPRFPWCHLRKSSPFVHDLPKIHILHYNPFPFRKANAL

SEQ ID NO: 114693 - protein, 45 aa, Gossypium hirsutum
  unsure (1)..(45): unsure at all Xaa locations
  Clone ID: uC-gsflnu33B098d03b1.pep
LHTVLISTQHDETVTKDEGAADHKEHVIKPCIPEKXLDGKTITTP

SEQ ID NO: 114694 - protein, 66 aa, Gossypium hirsutum
  Clone ID: uC-gsflnu33B098f03b1.pep
GWRHSEEINWRHRRRSKQVNRDGRDTRRLRWRKTKTRLQKENDCISSSFFSFSNVGTKKDNMKLCQ

SEQ ID NO: 114695 - protein, 41 aa, Gossypium hirsutum
  Clone ID: uC-gsflnu33B098h09b1.pep
SVILSIWRKTRMILLPVSMELIKQLKLSRDYWKIWFKDKRN

SEQ ID NO: 114696 - protein, 53 aa, Gossypium hirsutum
  Clone ID: uC-gsflnu33B099a12b1.pep
IPFVRPKIQKLSTFFIDTSKFHRLFSKKKNKLPSMEKITNSYELKHFHSLADS

SEQ ID NO: 114697 - protein, 59 aa, Gossypium hirsutum
  Clone ID: uC-gsflnu33B099b09b1.pep
RQEKNEKKEGKNEKKTPQKTIKRARLKSFSAFYQASQNRSLLTNLLGGRLLSGFMFPPL

SEQ ID NO: 114698 - protein, 32 aa, Gossypium hirsutum
  Clone ID: uC-gsflnu33B099c09b1.pep
ALIWTLIKLMRSNLRKSYHTSSMSNVKALLYY

SEQ ID NO: 114699 - protein, 83 aa, Gossypium hirsutum
  Clone ID: uC-gsflnu33B099f12b1.pep
RVFRRGPFRVVVSTDLLDRGIDVQKVFMETQSWNLNTARELRSLNTCVAEDLDRKGVDMTSYPQILRGCYITDKGMKGLSMQS

SEQ ID NO: 114700 - protein, 35 aa, Gossypium hirsutum
  Clone ID: uC-gsflnu33B099h09b1.pep
TNSSSNLLSISSPYSASLSLLATSFSPSRPPTRQQ

SEQ ID NO: 114701 - protein, 108 aa, Gossypium hirsutum
  Clone ID: uC-gsflnu33B100a01b1.pep
INHFRDISCNSQLLQWDQCSCTPLAFALIQPRFHCGPYSPSLTYAYHLSVLTWFHPLSTRRIWLSPRTNAHVTIHVAHVSFQSSSGTSSWCLSAYLGGSTRSPTAFMV

SEQ ID NO: 114702 - protein, 171 aa, Gossypium hirsutum
  Clone ID: uC-gsflnu33B107c08b1.pep
SSFSSFLRFFSYSCACYLSPFVSLLFIYLFIFIFFINFTFYLLKINRYLSLLCSSATFMAVLPTGSSHLELTISVPGFASSPSFPSSGDQGGCTVRDLDINQVPAEDVWITASMEDEEESCNNGAPPRKKLRLTKEQSRLLEESFRLNHTLNPKQKGALALQLKLRPRQVE

SEQ ID NO: 114703 - protein, 105 aa, Gossypium hirsutum
  Clone ID: uC-gsflnu33B107g08b1.pep
VPGGRSRASMLTDCCFATAYFFFRAACIQLAGLGNSIGLAWAILWADPSYSLLGVFSLYAGWPILVWARTDSPIGQGPCLIGDGYPPCVVSLPPLCSVTSPSASP

SEQ ID NO: 114704 - protein, 53 aa, Gossypium hirsutum
  Clone ID: uC-gsflnu33B107h07b1.pep
MSQAGGGKNGASKRAAPLFFFFFFFFFFFFFFFFFFFFFFITSRSRYLFFSIY

SEQ ID NO: 114705 - protein, 54 aa, Gossypium hirsutum
  Clone ID: uC-gsflnu33B108b12b1.pep
GIIKSDLSTHGIVRPIHRLRTTGPWVLPRVRGVSPHKCDEGPQTDARFACVTKT

SEQ ID NO: 114706 - protein, 57 aa, Gossypium hirsutum
  Clone ID: uC-gsflnu33B108c09b1.pep
KQKTLTDKKIHHFYLLKFKTMVKQNFLQAWSTPPLPPPLSPPPPTPPTLLMIFTGRV

SEQ ID NO: 114707 - protein, 53 aa, Gossypium hirsutum
  Clone ID: uC-gsflnu33B108f12b1.pep
NCAILVRIYMDHGAAHMVLGPGQQLGITIADIRYSNSLLDLISKTIIVMVCSI

SEQ ID NO: 114708 - protein, 118 aa, Gossypium hirsutum
  Clone ID: uC-gsflnu33B109b03b1.pep
SLSSSVFLLQYPQVFASEVSHGFSEVCRNPNLSASLPADAAIAARLRVSVVLCLPNLCTIGGKASVYVLPLRLRQGQRPRALTKQQPRPMSGNRKSSRSALYPPLLVAHRCRASYGEP

SEQ ID NO: 114709 - protein, 59 aa, Gossypium hirsutum
  Clone ID: uC-gsflnu33B109c03b1.pep
AKGEEALQKNTMGGKREFTPMKRTNATPQNTNNEPPKEKNGATIRGDPTQILNKNNTQN

SEQ ID NO: 114710 - protein, 70 aa, Gossypium hirsutum
  Clone ID: uC-gsflnu33B109g03b1.pep
ATDGKAGRYVPLRKLNQHMGFVCVSSLCWSVAPWRCRSATCNKALSSYGVDNTKIQKVGCMRRTVTMDRV

SEQ ID NO: 114711 - protein, 82 aa, Gossypium hirsutum
  Clone ID: uC-gsflnu33B109g09b1.pep
VRFIQGLGAFSTQSRVLRLCHAVPVTTSVPCMGFVASAAKDEPAGILWEITPGARLGWLFRLSCNVHARSCSRVASQGGRKD

SEQ ID NO: 114712 - protein, 28 aa, Gossypium hirsutum
  Clone ID: uC-gsflnu33B110b03b1.pep
YGYNSIMRTSRLIMDHSLMPSVENFRSH

SEQ ID NO: 114713 - protein, 93 aa, Gossypium hirsutum
  unsure (1)..(93): unsure at all Xaa locations
  Clone ID: uC-gsflnu33B110b05b1.pep
STRTDKKALKKAVANQPESDAMEAXGRSLQLSESGLFDGECETQLDHSVTAAGYGTEKGQDYWIVKNSCGSSXGEAGYLRRARNVGNTVTGIC

SEQ ID NO: 114714 - protein, 92 aa, Gossypium hirsutum
  Clone ID: uC-gsflnu33B110b06b1.pep
KNHDLEMLSAVEPRRTSWSHSTASLLVRSTIAVAASVLHYSSEQLINHQVLNGTQCSNGPVLMVVGCLLSWAWSLYLVALLKPPWTFAFPDA

SEQ ID NO: 114715 - protein, 96 aa, Gossypium hirsutum
  Clone ID: uC-gsflnu33B110c04b1.pep
RQSVPAPSLIHHPAKRGCAARQIRWGTPGVSQAPRWKTAARELKFGDPMKKLGRSMAAGENLGPPKGAPRFWDFCLFFSFFFFNFPPFFFFFFLFI

SEQ ID NO: 114716 - protein, 49 aa, Gossypium hirsutum
  Clone ID: uC-gsflnu33B110c07b1.pep
LSNHLLLNVTLYCSDHEPMLPNSQLRWAWGGNIGAPLTGPPPFGSSDAW

SEQ ID NO: 114717 - protein, 86 aa, Gossypium hirsutum
  unsure (1)..(86): unsure at all Xaa locations
  Clone ID: uC-gsflnu33B110e03b1.pep
VWYTDRDEHEVVIEGTLLNPNMSTSGSASQEDAFQVMAAYNAPAMHEAVPAEEHGIVLSTDEQSEEGASHNLKVKNXLHANKPWPH

SEQ ID NO: 114718 - protein, 49 aa, Gossypium hirsutum
  Clone ID: uC-gsflnu33B110e07b1.pep
RQGWGILQVGYYILLQSPSQFAANEYCLMTIRALPFTKDHLVAHLLRTI

SEQ ID NO: 114719 - protein, 34 aa, Gossypium hirsutum
  Clone ID: uC-gsflnu33B110g04b1.pep
SSVSKGAWALVRYDPPMAYFFNISNDPFNRSWTW

SEQ ID NO: 114720 - protein, 50 aa, Gossypium hirsutum
  Clone ID: uC-gsflnu33B110g05b1.pep
VSRANKRRTSEGFDGILGFYTKAQVSWLRARKGDWAHEPTPNVADKYLPT

SEQ ID NO: 114721 - protein, 60 aa, Gossypium hirsutum
  Clone ID: uC-gsflnu33B110g07b1.pep
IASPANFTFVYDIPLLELSKLCTMVPSIFQTTRSLMKGSAVVGMHSCPLPANRDGLWLEK

SEQ ID NO: 114722 - protein, 61 aa, Gossypium hirsutum
  unsure (1)..(61): unsure at all Xaa locations
  Clone ID: uC-gsflnu33B110h06b1.pep
DALMDERETIWNEADGKPMTSTVRLKHTHTQLISSHKFCIEIVXLCIAQGIAAYLYNVVKK

SEQ ID NO: 114723 - protein, 50 aa, Gossypium hirsutum
  Clone ID: uC-gsflnu33B111c05b1.pep
SCNPAVLNLDPLKASPLISLFFFFFFFFFVPFFFFFFFFFFFFFFFIFFF

SEQ ID NO: 114724 - protein, 68 aa, Gossypium hirsutum
  Clone ID: uC-gsflnu33B111e05b1.pep
MFLSSKYRKIQFPHGPRCGACGQSLCYVLITTLRSEISMPCLCVQRRRIRIGFLVIPYIPIIRHELSA

SEQ ID NO: 114725 - protein, 79 aa, Gossypium hirsutum
  Clone ID: uC-gsflnu33B111e06b1.pep
GAWFIAYVSFPLDSHHILCNFAIIQPSYTLAPQMDKCSVCCSTYDTYSPMVYSTRKFCTSINPRTLVHRLSGSTQASFS

SEQ ID NO: 114726 - protein, 84 aa, Gossypium hirsutum
  Clone ID: uC-gsflnu33B111h12b1.pep
RGMRHLNDPIVVRLATSEFFRTPFQEHASLHRACDLSPLRIWLRTIITRVHYPLIWEMVINPLLTGTAQEDIIIDRAINLMVML

SEQ ID NO: 114727 - protein, 68 aa, Gossypium hirsutum
  Clone ID: uC-gsflnu33B112a02b1.pep
IFLSCFILVSFGYCICCSFGSFLEVQVSIIVCRKSSPPRYVISWGGHRICKVMSGGYFIIMDVSYIWI

SEQ ID NO: 114728 - protein, 58 aa, Gossypium hirsutum
  Clone ID: uC-gsflnu33B112a12b1.pep
PTRPPTRPRTRGFLFSDGKISWELFFSAALLSIFLGIKHSSRESAMFLNIYPVCFRNP

SEQ ID NO: 114729 - protein, 65 aa, Gossypium hirsutum
  Clone ID: uC-gsflnu33B112b11b1.pep
SALLICLNVHNVGPKSCDITPQETGMFSLLLCSLLYKPSISSTVFLLFPHPLTILSLIKNAIRCY

SEQ ID NO: 114730 - protein, 95 aa, Gossypium hirsutum
  Clone ID: uC-gsflnu33B112c09b1.pep
DVDEMIREADVDGDGQINYQEIGKVMMASLSSPWKPVSRSTCSARQRAPHDRRPSARNSRTIENSEDTEPFAPCHTDNHSRITTKALSTEWHTVG

SEQ ID NO: 114731 - protein, 99 aa, Gossypium hirsutum
  Clone ID: uC-gsflnu33B112f06b1.pep
SLIARFMRWLRYGFSLLSLPQCRVSGIVSSRWSLGKVMSDGLGSCFSFLDGDVSRVPPLVSSLLVIQHSQLMVGVKKSVPLLVPVLFIAIISMLSVEYS

SEQ ID NO: 114732 - protein, 82 aa, Gossypium hirsutum
  Clone ID: uC-gsflnu33B112h06b1.pep
HSRSRTLGKEKSEYQADWRPKNRRKWQDNGRCTWTPCRYCNEWCVTHGSWLLLLRLCSVRIHMILSLKGISSFQYMEKNCIA

SEQ ID NO: 114733 - protein, 81 aa, Gossypium hirsutum
  Clone ID: uC-gsflnu33B113b08b1.pep
GARHGVPRKDEARGLHEARPRKSPCKAADREGNRGDATDPTTRQPETGSHISPPPQYKFFFFFSFFFFFSAGFLILNRTRR

SEQ ID NO: 114734 - protein, 91 aa, Gossypium hirsutum
  Clone ID: uC-gsflnu33B113c02b1.pep
MKHWMEKGPGSSSIGLGNFYSPTTIKLPTCGAWLPLPGLFDSFSLLIGRRRPSWRNHRRIRDESNIWRLIAGLNIAYGEEQLIERIKIIMY

SEQ ID NO: 114735 - protein, 73 aa, Gossypium hirsutum
  Clone ID: uC-gsflnu33B114c03b1.pep
MVHLNNFNFVVRPHGPKVTSFSGLSSLFFFFFFCSFFFFLNKIFIHDFIPKIIMLIQMLFDIYPRKKIPDAWA

SEQ ID NO: 114736 - protein, 54 aa, Gossypium hirsutum
  Clone ID: uC-gsflnu33B114f11b1.pep
HCSLTQLVVVGFHLHHMVRFQVLVNHHRISCINQSLICSHRSFPSSTWIRSTLQ

SEQ ID NO: 114737 - protein, 98 aa, Gossypium hirsutum
  Clone ID: uC-gsflnu33B114h07b1.pep
CPTLTVGEHENLSKCLGPKGTTNHRTLKASYTIKLVTPTGEDSHFPAPVDQYTTDAAEEGRGALPYPCHAGPCITCAGETVYDSVRQHYSIVLDEKQI

SEQ ID NO: 114738 - protein, 80 aa, Gossypium hirsutum
  Clone ID: uC-gsflnu33B115a02b1.pep
LLKKKKKKKKKKKKKKKKKKKKKKKKKKKKKKKKKKKKKKKKKKKKNKKKKKINKGGGLFKGIKFFPPWSAVNCFFFGPL

SEQ ID NO: 114739 - protein, 57 aa, Gossypium hirsutum
  Clone ID: uC-gsflnu33B115c01b1.pep
KHPAGRQNRGSQNPAPQNRPPILYMLSFWFVFFFFFFFCFFLFFFFFFFFFFFFFFL

SEQ ID NO: 114740 - protein, 123 aa, Gossypium hirsutum
  unsure (1)..(123): unsure at all Xaa locations
  Clone ID: uC-gsflnu33B115d02b1.pep
RLSEPYKGIGDCIKRTLTDEGFGSLRRGNTSHAIRSFPTQASNFAFKDYFKKLYNFKKDRDGYWKWFAGNLSSGGAAGAPSLLYDYSLDXARTRITNDAQAAKKGGERQFNGFADVYRKTLKS

SEQ ID NO: 114741 - protein, 83 aa, Gossypium hirsutum
  Clone ID: uC-gsflnu33B115f10b1.pep
APPDQQTTEECWARDPQTVSQEDRDDGQDQQDYQDRPPRPLIDMDDLIRWSLYRPIITLLITTLLFLYVTDGTDIGHKTQQDA

SEQ ID NO: 114742 - protein, 127 aa, Gossypium hirsutum
  unsure (1)..(127): unsure at all Xaa locations
  Clone ID: uC-gsflnu33B115g06b1.pep
LGGPFWGTQVSFLCGSRCFASFLGPPNSDELAVFLHRSDWETRGVPQFNGFGENPRFPTWDSCDKALPVGFSKSFPSLIGICAPPCGGALTPEGGAFSRTVTVSLGAFFPPXFGFFLFFLASWAGFP

SEQ ID NO: 114743 - protein, 60 aa, Gossypium hirsutum
  Clone ID: uC-gsflnu33B115h10b1.pep
VFFAGVSNLSSAGYLRTIFFIDSPNIMTLTAFLLLLKCKIHCFTNNINIDLQTIYSRCVL

SEQ ID NO: 114744 - protein, 87 aa, Gossypium hirsutum
  unsure (1)..(87): unsure at all Xaa locations
  Clone ID: uC-gsflnu33B126d03b1.pep
FVLITYDQLLIVKVQDKWVYRDGKATSXVVFIREMNKEAGIYXPFXSSIQAAENTIGVXYMLKRFESNQTNLHCWGYNGDGGIPDCK

SEQ ID NO: 114745 - protein, 96 aa, Gossypium hirsutum
  Clone ID: uC-gsflnu33B126h02b1.pep
CQRGGRKPICGDRSSGYAGHDDGWNQSFSYCYGQTPEVFENARQSNARTRQCKATGKSMTHETRRRTHSCPKARTNRGFVLKLCTRFCTYLHIASK

SEQ ID NO: 114746 - protein, 105 aa, Gossypium hirsutum
  unsure (1)..(105): unsure at all Xaa locations
  Clone ID: uC-gsflnu33B126h03b1.pep
SFYLWECVHAEREPKIGVPKWGTDIAEYQXKPILRGSXGQPPQICLSLSAAKPAAVDGKTPIQGYHQFSKSGKITCSCTMVNSIIGITERLRPDTELQIASHIKA

SEQ ID NO: 114747 - protein, 90 aa, Gossypium hirsutum
  Clone ID: uC-gsflnu33B127b10b1.pep
LIDGVLVTVQSWLASLETMTLTGLEALPALTPLERLNLTLMDPRLLFTPLNKGIDEDNAEHRRLAKSKLVYRLPGAYMNLHGVRHDDETL

SEQ ID NO: 114748 - protein, 44 aa, Gossypium hirsutum
  Clone ID: uC-gsflnu33B127h02b1.pep
PAPTRTELLGPPTFSYHNDHALRKGSKNMNGSMVAVTGNSLCLK

SEQ ID NO: 114749 - protein, 46 aa, Gossypium hirsutum
  Clone ID: uC-gsflnu33B128d08b1.pep
KGPPLFFFFFFFFFFFFLIFFFFFFFFFFFFFFFFFFFFFIFFFFF

SEQ ID NO: 114750 - protein, 135 aa, Gossypium hirsutum
  unsure (1)..(135): unsure at all Xaa locations
  Clone ID: uC-gsflnu33B128f06b1.pep
LLALGLGKQIFDDKNSLGETLKNKQNAXASXMGDQKSAMNDVITEYGVAVEGFCMSRCGTQGSGXSSTDRVVKAMKHSRFGYIWVGHSQTQGLGQCAWTTHQPIYRPHSAPTIAPNNNGGLDGMYINLVSLSVGT

SEQ ID NO: 114751 - protein, 104 aa, Gossypium hirsutum
  Clone ID: uC-gsflnu33B128g11b1.pep
IKKKKKKKNPKKKKKKVFSLYRFSAWGVGFAGPWFLFGALQVHFFVLGSPNVIPGALFLYPSFGEFLAVPLLTVVGIVPLFAGWVFSNRAPPYLFFEKFPFLID

SEQ ID NO: 114752 - protein, 72 aa, Gossypium hirsutum
  unsure (1)..(72): unsure at all Xaa locations
  Clone ID: uC-gsflnu33B128h06b1.pep
FMRSRTLGLVLNSAQDMQTQHEAYLASXXSPSIVYEQIGAIYNCSTIVEELAIHRCQTYFNNWFLRENGLRR

SEQ ID NO: 114753 - protein, 78 aa, Gossypium hirsutum
  Clone ID: uC-gsflnu33B129c08b1.pep
CSLFYRVNPTDRRMSFKGNRDNTIIHVKSLSHIVRSDTSKIRSLLSRVLTWKAHPVVHRASYITENVVIFKVVARASR

SEQ ID NO: 114754 - protein, 45 aa, Gossypium hirsutum
  Clone ID: uC-gsflnu33B129d08b1.pep
RINAVLHVISLEHIVSSNTITVSSFVEQVLARIGHQVVNRARYIP

SEQ ID NO: 114755 - protein, 77 aa, Gossypium hirsutum
  Clone ID: uC-gsflnu33B129f08b1.pep
SLFSVFQFSDFIIVTVMNSYTLKYSLSVKRGITSAYSQHRFKHCVKLCRTCIRLCRPSSCAPCSLHPRKHRYNQGCH

SEQ ID NO: 114756 - protein, 75 aa, Gossypium hirsutum
  Clone ID: uC-gsflnu33B130a09b1.pep
ILGQKKKRLFLPSPGRKTWTPKKPPPLFFFFFFFFFFFFFFFFFFFFFFFFFFFFFFFFFFFFPLFFFFFFFFIR

SEQ ID NO: 114757 - protein, 93 aa, Gossypium hirsutum
  unsure (1)..(93): unsure at all Xaa locations
  Clone ID: uC-gsflnu33B130f02b1.pep
MLSFQGPLQGRTRKAVIGGKYGTXYGSILRNQIKKTDVNXHNKYFSQFSLKHTFEHKXLLISSCTHIIKVKAVGAYTLNTATAMTXRITIRRL

SEQ ID NO: 114758 - protein, 130 aa, Gossypium hirsutum
  unsure (1)..(130): unsure at all Xaa locations
  Clone ID: uC-gsflnu33B130g01b1.pep
MGSNAKVVRRHERAEAKPGGRIVMELFPYATPSTAYNFRSLCTGEKXGNLRSGXPLHYKXSNLHRLNPDFMCQGXKLHSTTTDTGGESXIYGSKLADEXFMKKHSGPRILTMANAGPGTKGSQTCISYPL

SEQ ID NO: 114759 - protein, 66 aa, Gossypium hirsutum
  Clone ID: uC-gsflnu33B130h02b1.pep
FLFNLILIQPLKYKKKTLQCPIRFTITNNVNQHYLLLPLLFSLNYFPIPSKFSSDTNTFLSQSSFS

SEQ ID NO: 114760 - protein, 56 aa, Gossypium hirsutum
  Clone ID: uC-gsflnu33B131b06b1.pep
RVGSLGSLTRYCPPTSFLLEHVILGSWIFFYGGRRRASRRLNYWPATLVRPYSKGV

SEQ ID NO: 114761 - protein, 104 aa, Gossypium hirsutum
  unsure (1)..(104): unsure at all Xaa locations
  Clone ID: uC-gsflnu33B131c05b1.pep
SFLKYPIEHGIASIWDDTEKIWHHTFYNELRVASQEHPMLLTNTPFNPKANTQKRTXIMVETFNVPAMYAAIQAALSLHASGRTTGLVLDXSGDGVTHTVPIPE

SEQ ID NO: 114762 - protein, 37 aa, Gossypium hirsutum
  Clone ID: uC-gsflnu33B131c06b1.pep
LFIRINEFKIQLKFDPGPIGQPTIGISPGTIDQGITS

SEQ ID NO: 114763 - protein, 39 aa, Gossypium hirsutum
  Clone ID: uC-gsflnu33B131c08b1.pep
FTRPRKRLERTAIIVSRSDSSNNGLKCTGRVRGQHYIVT

SEQ ID NO: 114764 - protein, 66 aa, Gossypium hirsutum
  Clone ID: uC-gsflnu33B131d05b1.pep
PCCKSRLPAAHPMMRRTTSPSLWHYNPGDQHRSHSSNRLVQSASQTSQPLKNIKEPPTQYMSIISV

SEQ ID NO: 114765 - protein, 53 aa, Gossypium hirsutum
  Clone ID: uC-gsflnu33B131d09b1.pep
QNGGDMAGKMIMLDRQLTCSQRGCLLVQDLIPKMIKITAEPPPWPMNEPIVGT

SEQ ID NO: 114766 - protein, 46 aa, Gossypium hirsutum
  Clone ID: uC-gsflnu33B131f05b1.pep
ILSLHPQITFSKRHHGDLKDMELELTLPTLKLRSGTKLTHPSCLNH

SEQ ID NO: 114767 - protein, 67 aa, Gossypium hirsutum
  unsure (1)..(67): unsure at all Xaa locations
  Clone ID: uC-gsflnu33B131f06b1.pep
GRQQDFCSGHRLAHYHLYIXLVKLVKREMRIPCMPLRGQDPLRTLVVRRIRNSSSPRLYRRVAGRKK

SEQ ID NO: 114768 - protein, 82 aa, Gossypium hirsutum
  Clone ID: uC-gsflnu33B132a10b1.pep
TSLQSTHPLALHFRGADVFICRRRIILIPVDQPAEPFCFAFRGVTTEVGLSHNWKTFQPTKVSRVAFLIQAGFLRIRVLAPP

SEQ ID NO: 114769 - protein, 55 aa, Gossypium hirsutum
  Clone ID: uC-gsflnu33B132b04b1.pep
LLDTKDHRLGEITSGTPRNMGLIGLCSQTVKLVIEVDYEVDEPDEDGDGEEPEER

SEQ ID NO: 114770 - protein, 40 aa, Gossypium hirsutum
  Clone ID: uC-gsflnu33B132b07b1.pep
RRRLLNLSTYFNGVTCLRLQEHFLDLCYALKSLITYLFNI

SEQ ID NO: 114771 - protein, 37 aa, Gossypium hirsutum
  Clone ID: uC-gsflnu33B132d02b1.pep
PSCPTYTKIKQWSSDKMSDIKHTTHGIYTAGLSRKLH

SEQ ID NO: 114772 - protein, 49 aa, Gossypium hirsutum
  Clone ID: uC-gsflnu33B132d07b1.pep
GPNIPLLLHSSEIPLGGLRRDYGLYPLTPSHRHSCYPFNPPPHSNSLPI

SEQ ID NO: 114773 - protein, 50 aa, Gossypium hirsutum
  Clone ID: uC-gsflnu33B132d10b1.pep
TARRQIARNCRENFYYKNLYRMILSNFLNVFITCYPFNYPRDGHLTARVD

SEQ ID NO: 114774 - protein, 32 aa, Gossypium hirsutum
  Clone ID: uC-gsflnu33B132f11b1.pep
DYLQFTRKILLVISYIFLYHMAPLYYWNVSIT

SEQ ID NO: 114775 - protein, 46 aa, Gossypium hirsutum
  Clone ID: uC-gsflnu33B132g11b1.pep
CSHVRATVQPRGGLNVIMLVAQENHIYNSCQNGGSIPSFYHVKYKT

SEQ ID NO: 114776 - protein, 37 aa, Gossypium hirsutum
  Clone ID: uC-gsflnu33B133d11b1.pep
TTHGERIRHHAQLFWSCARKFCQTGPPLLTPHNGRVV

SEQ ID NO: 114777 - protein, 58 aa, Gossypium hirsutum
  Clone ID: uC-gsflnu33B133e04b1.pep
GTNSCYPLQIDNNPPRYFLGNPLHIVNLSSIYMRSLFIIFKLLFKVPTIIIWRDFTYE

SEQ ID NO: 114778 - protein, 66 aa, Gossypium hirsutum
  Clone ID: uC-gsflnu33B133e07b1.pep
SSQTIYLSRPRGAILKKKIFSVTTMTRDKTRTTLGPKAGVTQRRKRKKAALAKAAWIMQPWHEQPC

SEQ ID NO: 114779 - protein, 74 aa, Gossypium hirsutum
  Clone ID: uC-gsflnu33B133g10b1.pep
LAYGNTCQNTGGDFNNHEGYITQRDRSSTEKSIPMSTRHPNNEPGRQNLIATGQNDLVRSNTPSGKSYLLARMH

SEQ ID NO: 114780 - protein, 110 aa, Gossypium hirsutum
  unsure (1)..(110): unsure at all Xaa locations
  Clone ID: uC-gsflnu33B133h02b1.pep
LAVAHASGGVKRGIFVKTLTGKTITLEGESADTIDNVKAMIQDKEGIPPDQQRLIFGGKELEDGRTLSDYNIQKESTLYXAFDFEVVPRRGRRRPTPSPRRASTRRRRSS

SEQ ID NO: 114781 - protein, 109 aa, Gossypium hirsutum
  unsure (1)..(109): unsure at all Xaa locations
  Clone ID: uC-gsflnu33B133h08b1.pep
HASATFSEYTVVHVGQVGKVNPEAXLDKXCVLSCGMSTGFGAXTVNVAKPKKGQSGAIFGIRGCGLGGGEGTRSFWGFRIIGGDLDPIRFELAKNFGVSEFVNPKDYNK

SEQ ID NO: 114782 - protein, 54 aa, Gossypium hirsutum
  Clone ID: uC-gsflnu33B134c03b1.pep
RQIVDDRLVHKNARCDVMSWPYLLTGPAYLSWQIACSYKFQFRTEGRMGGRTRR

SEQ ID NO: 114783 - protein, 66 aa, Gossypium hirsutum
  Clone ID: uC-gsflnu33B134c04b1.pep
YPLITVTLTLPLRQLGDVRFVHKNDHCGACPCHISFRDRHSEVARWLAVLGFNPAQNTACVDGKIG

SEQ ID NO: 114784 - protein, 45 aa, Gossypium hirsutum
  Clone ID: uC-gsflnu33B134c06b1.pep
LPLLNSCNDANSSMIGSCTRIIIAALVRVISHSATGIVKLAYGWR

SEQ ID NO: 114785 - protein, 62 aa, Gossypium hirsutum
  Clone ID: uC-gsflnu33B134c07b1.pep
FLRVRPPMRHRGRKLNLVLQTICQLKYVGRVMRYGTNKRRNEAACAQNDQRRFGVMEESEQR

SEQ ID NO: 114786 - protein, 58 aa, Gossypium hirsutum
  Clone ID: uC-gsflnu33B134d08b1.pep
LCHYANSPLMGSCSRIHTQTSCSTLTFFLARHFLLACAFAVLRFNSALSPACVGGRVG

SEQ ID NO: 114787 - protein, 66 aa, Gossypium hirsutum
  Clone ID: uC-gsflnu33B134d09b1.pep
PTRPPTHATLGGVFKPNGPNPHPSLLFRSRNETSAGHAPKRCILSTTKSMPIWRHRRARLTDNHST

SEQ ID NO: 114788 - protein, 103 aa, Gossypium hirsutum
  unsure (1)..(103): unsure at all Xaa locations
  Clone ID: uC-gsflnu33B134d12b1.pep
LFLPIIPTTTMGSLPQTLVLKRARREFKAHKISEDDYMKPIREEIKKVGDLHEKLVIAVSAHGESXETVRLGTMGEPLPTHAFTVYGWKQTYGSRCVKPPNIY

SEQ ID NO: 114789 - protein, 51 aa, Gossypium hirsutum
  Clone ID: uC-gsflnu33B134e01b1.pep
NRKPYGKLTMPGEEVDMKRTRVAMMILVYEPNYAELAQLKSKINGNQGVRR

SEQ ID NO: 114790 - protein, 51 aa, Gossypium hirsutum
  Clone ID: uC-gsflnu33B134f02b1.pep
SYTPGLPLILLCHYGNSAKIDSYTRMLIATRVRAISTYGTGIVKLAIRLQL

SEQ ID NO: 114791 - protein, 57 aa, Gossypium hirsutum
  Clone ID: uC-gsflnu33B134f04b1.pep
SRVRPHVRPSVGNLNLILQTISQLKYAGPVRRYGPNMRPNEHACARTDQRRVAAIDE

SEQ ID NO: 114792 - protein, 67 aa, Gossypium hirsutum
  Clone ID: uC-gsflnu33B134f06b1.pep
VYSPALPLLFLIHCANSAFIVSCTSMLVSTPVQAISPFSTGIVELANCLQFYVSFPHRVPHGWAEAL

SEQ ID NO: 114793 - protein, 61 aa, Gossypium hirsutum
  Clone ID: uC-gsflnu33B134f09b1.pep
PDLTGQVHRIFVRILVPHIHPCYAHPYHLPSFDLPSVPGRVSGTVFFILILSTVSVIGRVA

SEQ ID NO: 114794 - protein, 98 aa, Gossypium hirsutum
  unsure (1)..(98): unsure at all Xaa locations
  Clone ID: uC-gsflnu33B134g03b1.pep
ERNRHLLFSPPYNSSLIRILSTSSGAAFSKSHVPVGNVTLNRQVRLPRLDPCMQQHHLLDTHKVHCDELDMNSSLGFSLANARSFPGNTSARVDXRVG

SEQ ID NO: 114795 - protein, 69 aa, Gossypium hirsutum
  Clone ID: uC-gsflnu33B134g04b1.pep
CLIRWITVALALQLRQIGVVRFVHQHARCGACSGLFSFLDLHSGVGYWLAVLSFFSAQGAAWVGGRQGG

SEQ ID NO: 114796 - protein, 73 aa, Gossypium hirsutum
  Clone ID: uC-gsflnu33B134h09b1.pep
SSSPSTITLIKKKGRTMGGLHNLVPGAFPLQAPTLAVTVIATQLPFFWRTPKFGKPGGNPTDSDWKTLALPHL

SEQ ID NO: 114797 - protein, 57 aa, Gossypium hirsutum
  Clone ID: uC-gsflnu33B135b11b1.pep
SWAFDLCCKIDLTIPRIYVSHILPHPMDLRCSPCSISSQYLLLAGPSCSLTDPLAVL

SEQ ID NO: 114798 - protein, 67 aa, Gossypium hirsutum
  Clone ID: uC-gsflnu33B135c10b1.pep
PTISETQAESRARPQCKHRTATTTQSLLPQNSEPTDLAPQRTWLPELGQILPSKVIRDYVALHSQGA

SEQ ID NO: 114799 - protein, 44 aa, Gossypium hirsutum
  Clone ID: uC-gsflnu33B135d08b1.pep
RYSTIRSVPLLPVIFARLRLSLDPALDCSVITTSATARVAGRDS

SEQ ID NO: 114800 - protein, 45 aa, Gossypium hirsutum
  Clone ID: uC-gsflnu33B135d11b1.pep
RSYNKLHTSTIYNLLHPNYTFTPIYRYQLIFKQHKLNCTFYQKHR

SEQ ID NO: 114801 - protein, 45 aa, Gossypium hirsutum
  Clone ID: uC-gsflnu33B135e02b1.pep
PMLSATRAVEVVKLKGRLIAATITLTKNWLENVMGVSECQFSLLA

SEQ ID NO: 114802 - protein, 41 aa, Gossypium hirsutum
  Clone ID: uC-gsflnu33B135e03b1.pep
KMTCRYPYNNVQRIFGFSDSCSYQLTYKLDKLNWTRGRTRR

SEQ ID NO: 114803 - protein, 79 aa, Gossypium hirsutum
  Clone ID: uC-gsflnu33B135e08b1.pep
FTYIIESPPAVSCLSLRRSVSCQDLTTEIDACQRQLLHIPCCSTATRQQRQHAFVAKFKPRSPFQLEKIKWTCDRTNMR

SEQ ID NO: 114804 - protein, 35 aa, Gossypium hirsutum
  Clone ID: uC-gsflnu33B135g05b1.pep
LITIFSQSILVVLAAAIGLPLSPARSTGRVDGKIG

SEQ ID NO: 114805 - protein, 45 aa, Gossypium hirsutum
  Clone ID: uC-gsflnu33B135h06b1.pep
RQPSPITFYYPRNNLQPMHACSPMCSSQPTNKLDQINWTRGRKNK

SEQ ID NO: 114806 - protein, 51 aa, Gossypium hirsutum
  Clone ID: uC-gsflnu33B136a02b1.pep
LCYARPRGTSVNLLLCIPTYLNLPRSQCLEHDFPPPVYFNYSLLQSCPRVR

SEQ ID NO: 114807 - protein, 69 aa, Gossypium hirsutum
  Clone ID: uC-gsflnu33B136b11b1.pep
ASSAISLSLGKKGYYRSRGCGIKAGVVFFGYPLKKEGGRFPPRAKWEPPGRSPPFLKKTTWAAPEIPDR

SEQ ID NO: 114808 - protein, 51 aa, Gossypium hirsutum
  Clone ID: uC-gsflnu33B136c09b1.pep
LASSTAPQPQSPHPPTRTVVSQGSSNCSFAFRMIQSNHQAEVSICSYLCGA

SEQ ID NO: 114809 - protein, 142 aa, Gossypium hirsutum
  unsure (1)..(142): unsure at all Xaa locations
  Clone ID: uC-gsflnu33B136d10b1.pep
PGLLGTGKRPAKHPQRKPARAPAQHGGQPRQAPKHAPTTAKXAQKEEESNEGSNAEXHTDNTGQRRGPGKLPETGCYSQGGNPVKHGMKIAAAIKTALRTGAXTGANTIDTNRAPDCTRTFEPSHWRENCREKCHVTHNPTQ

SEQ ID NO: 114810 - protein, 56 aa, Gossypium hirsutum
  Clone ID: uC-gsflnu33B136f06b1.pep
RWALSCMCPIAWVILHRWPRIARQSLWILFCSSPWSLGVPDSAGKTKLVIHIESIW

SEQ ID NO: 114811 - protein, 103 aa, Gossypium hirsutum
  Clone ID: uC-gsflnu33B137c12b1.pep
PTRSAGDRGEGDFIFCVITSETAVNTTTGKTYTRDCDTINTVGQHADNKREEVIEPSKIKDEHLQVPIPVRRSTKNKRATAVDESHDVTPTDNFKEDTLQNEG

SEQ ID NO: 114812 - protein, 78 aa, Gossypium hirsutum
  unsure (1)..(78): unsure at all Xaa locations
  Clone ID: uC-gsflnu33B137d06b1.pep
DTKDVTTRGKGGEVLTKECTMNLHKRLHGCTYRMTDPRATKXIRKXRRKAMRTKDVREAASVTKTFGDRRIPRRPELD

SEQ ID NO: 114813 - protein, 55 aa, Gossypium hirsutum
  Clone ID: uC-gsflnu33B137h10b1.pep
KYGLLGLFRIVSLSNSELMFLVVTKYSLNSPPGELYIEFKLGYMVPILYVLIAFL

SEQ ID NO: 114814 - protein, 121 aa, Gossypium hirsutum
  Clone ID: uC-gsflnu33B138a04b1.pep
PLYQRPPPQGLYPLFHPAFPRPPLPFLRDGSSLTVMFLPAKILTVLSFDRVHHSFSQSRIVSFWKLLGSSSRMSINVVSMGRFHRTFWRFIQGDGRRCRMRALCGGSGAVHLRRPLGGTII

SEQ ID NO: 114815 - protein, 45 aa, Gossypium hirsutum
  Clone ID: uC-gsflnu33B138a05b1.pep
KKEAVRLAKQADFQTKTIISQHVPSTMRILTDTALTVTKMMTEKP

SEQ ID NO: 114816 - protein, 61 aa, Gossypium hirsutum
  Clone ID: uC-gsflnu33B138a11b1.pep
KNQYTSPLWGGPSTGSRPPYPSLRAFIFPLVDPKTHGLPPFFPRLAWPNPACSHINKLALH

SEQ ID NO: 114817 - protein, 134 aa, Gossypium hirsutum
  Clone ID: uC-gsflnu33B138c01b1.pep
KKKQKKKGRRLKKKRGPNTQKKQNTEEGHPGPRGRPPRPKPEPDGPPTTDGGRTFKGPPPPPPPPQLPRLFGQPPNHPRRGAGEPTLAHQTLGTPPNPCGDPPPPPPKWDPRRGPPPHNPPQPSAHPRSPLRPP

SEQ ID NO: 114818 - protein, 34 aa, Gossypium hirsutum
  Clone ID: uC-gsflnu33B138d05b1.pep
VTCTIKSVLPRGVMLDRGMSQSHPSLSNHPCWGH

SEQ ID NO: 114819 - protein, 94 aa, Gossypium hirsutum
  Clone ID: uC-gsflnu33B138f01b1.pep
PDLIAGPTHAFTCPNKKKKKKRKKKKKKEKKKKKKKKKKKKKNKKLKKNQKKKKKKKKKKKRGGPLKRTKLNSPAHEKQNFFNGAPKLKSRAPV

SEQ ID NO: 114820 - protein, 44 aa, Gossypium hirsutum
  Clone ID: uC-gsflnu33B139a11b1.pep
LHGDNPSLFAVLRDYGHFRQGWERQSHAGGALTGCEPYTRYTVG

SEQ ID NO: 114821 - protein, 95 aa, Gossypium hirsutum
  Clone ID: uC-gsflnu33B139c05b1.pep
GTFTKTKRLLRGGIAEPQDLLDHQDSELMQCLSTAWGSGDQDQGTYWRNSIITIIIMLINRNQTGSMSQEGGTRALHGSSHLQHHAVFEKPMRKA

SEQ ID NO: 114822 - protein, 83 aa, Gossypium hirsutum
  Clone ID: uC-gsflnu33B139c07b1.pep
VVSLLVAYVCLPPRSAFSRVWLPLASAPEQSIVPLLCEPCTLIFRVLPALFLSFLLPIFSPWAGSTPCVFQSPPCPGFSGRES

SEQ ID NO: 114823 - protein, 83 aa, Gossypium hirsutum
  Clone ID: uC-gsflnu33B139c09b1.pep
LVASLFLAYVCLPRRGASSCFCLALASASVSSSPPLRCVFCCIIGPLSPSLFLSFFLPFFSFWVDYTFFFFKAPPFLRFSGRV

SEQ ID NO: 114824 - protein, 80 aa, Gossypium hirsutum
  Clone ID: uC-gsflnu33B139c10b1.pep
RPLALPMFSTNAGMTPRAYACLQLLVARSAMLLKTANNVPIFSVYSLLCICPYCFRYGPFGLNPPLVYSNPPLTLGSPDA

SEQ ID NO: 114825 - protein, 77 aa, Gossypium hirsutum
  Clone ID: uC-gsflnu33B139d06b1.pep
SLSMASAIRIVASLTIAYVHLTPSSDISRVWLVLASAPEKCIVPLLCEQFTNMLHVQLALYMSFLLSIFSFWARSAG

SEQ ID NO: 114826 - protein, 85 aa, Gossypium hirsutum
  Clone ID: uC-gsflnu33B139d08b1.pep
VTRPENQTQGGDLNKQGGEPTHRGKTDSKKDQKRETRTTENKPTLYPKHRNDGQSPQGNREPTTSRRKHYRAGHKHTQRKGKQQL

SEQ ID NO: 114827 - protein, 72 aa, Gossypium hirsutum
  Clone ID: uC-gsflnu33B139e05b1.pep
RGGGFYNWGVEPKGIISPTGRTYTERGGYGPYSCIVRTVKAELTSPTRMREGTRRGGCHSLVGHELWLWDGE

SEQ ID NO: 114828 - protein, 69 aa, Gossypium hirsutum
  Clone ID: uC-gsflnu33B139e06b1.pep
RIVASLSIVQILVQRRSDTTLVSFLLASAPKKFNLPLMSEQFNIILHVQPALYMTFLSPIFHLWKRSTN

SEQ ID NO: 114829 - protein, 41 aa, Gossypium hirsutum
  Clone ID: uC-gsflnu33B139f04b1.pep
IWCIHHPKCLCLENWRCDTFEKKIPFIKKRPMVSKVSPEKI

SEQ ID NO: 114830 - protein, 57 aa, Gossypium hirsutum
  Clone ID: uC-gsflnu33B139f06b1.pep
AVQNLLSPSGVHLIQPLCPYPTLSIYDPPVWKYASFENLSPFKKTPPHPTFVSPEAS

SEQ ID NO: 114831 - protein, 56 aa, Gossypium hirsutum
  Clone ID: uC-gsflnu33B139f07b1.pep
RSDFSLVFLVLAFASGEVNSSFAVQLIEHYCPYPTQLCIGPSCRRYGSCGLKPPLI

SEQ ID NO: 114832 - protein, 46 aa, Gossypium hirsutum
  Clone ID: uC-gsflnu33B139f09b1.pep
TNRWGGFFLPRWFIQPKRIISPTVVSYKELAGLEQYCYIIPTLEED

SEQ ID NO: 114833 - protein, 66 aa, Gossypium hirsutum
  Clone ID: uC-gsflnu33B139f10b1.pep
SCVWLVPASASENSNAPLRCEQCCIIVRVPTSLYMSLLQPIFSFWVDSTNYFLKAPSNLGFSGRVI

SEQ ID NO: 114834 - protein, 53 aa, Gossypium hirsutum
  Clone ID: uC-gsflnu33B139f11b1.pep
SCFWLVLDSSLGDVLCSFTMGMLLQYGPCPARSFVVVIPSDILLLGETRHLVI

SEQ ID NO: 114835 - protein, 119 aa, Gossypium hirsutum
  unsure (1)..(119): unsure at all Xaa locations
  Clone ID: uC-gsflnu33B139g03b1.pep
YLFRAINSQCRCINYNNDADCTYITPIPDNKMTAGDAHEQEILLILDVAQGNTVHLICRKGVSILXTKDTCDAEIHLGDANDPSHKVFILMAVRQVRKAAAILRVRMMDCYSMDRGALR

SEQ ID NO: 114836 - protein, 52 aa, Gossypium hirsutum
  Clone ID: uC-gsflnu33B139g09b1.pep
CLILLSYGINARILSIPCPLFIRHYCLRYPPFGLNPPFRSLKPPPTIGSPDA

SEQ ID NO: 114837 - protein, 111 aa, Gossypium hirsutum
  Clone ID: uC-gsflnu33B139h10b1.pep
EYAHPVFVQAILYGISKFPVRDSPRSILRVALPFSTQGTRKLSPYCRLSLLKFTRIAQFTYRAMCCLLPSASVNSNSSLLWKCGSNIVHFMSSLSPCLLLEISYVRMEAPT

SEQ ID NO: 114838 - protein, 62 aa, Gossypium hirsutum
  Clone ID: uC-gsflnu33B140c04b1.pep
TPHEWWLPRKASLHSQDSSFPNANGYIIGSNRQFVSVKVRFTRLLHQFPCVLAKELLPHMLF

SEQ ID NO: 114839 - protein, 94 aa, Gossypium hirsutum
  Clone ID: uC-gsflnu33B140e02b1.pep
VFGAVIRAVLFAPTPCCVRGVPSLSLAGVSFRRAVRFIFVLYVCQSLHLCFVPAVVVILPVFCPRSISRCFPLVDRFALHIDPVPVGLGFRKRG

SEQ ID NO: 114840 - protein, 61 aa, Gossypium hirsutum
  Clone ID: uC-gsflnu33B140g04b1.pep
TPWRALSHCLSLCLLQARRWTGRTPAPGIYLGLRTNCADHRSRRNSTNRSASIFFIFKKLE

SEQ ID NO: 114841 - protein, 132 aa, Gossypium hirsutum
  Clone ID: uC-gsflnu33B141c08b1.pep
LLGIPHDAPPVSPLCKWVTPSSLVPVFSFEVPSCLVLLLFVPSMIRSCSWLPTSCGLPGFRPLPFLCFAAPGIGCGLPWVLLCRRWRTFPGVGSFRPPPRFSSCFGLFFVFWFLSVFFFLFFPFFCFSFFFF

SEQ ID NO: 114842 - protein, 58 aa, Gossypium hirsutum
  unsure (1)..(58): unsure at all Xaa locations
  Clone ID: uC-gsflnu33B141d06b1.pep
XHASGKGEGSGGVFERRRVFSLLSDRTHEHCREEPGCELHVQDSRGRKLSKERLRARG

SEQ ID NO: 114843 - protein, 79 aa, Gossypium hirsutum
  Clone ID: uC-gsflnu33B141g09b1.pep
TGADSPPFAYRSGSHSILVSAPLKEHMDMFANQNQRYVSSSLLNTASICSFPENNNSPYSCLNSSSLKLYSHISLLPDA

SEQ ID NO: 114844 - protein, 78 aa, Gossypium hirsutum
  Clone ID: uC-gsflnu33B141h06b1.pep
SQLHRPAIEWVPLLSKTDSSYWVEVAEFASVCRRQPDMLGRTLRKSFLRGHSILRRLNELWFQGSRRCRDPSPALIYG

SEQ ID NO: 114845 - protein, 77 aa, Gossypium hirsutum
  Clone ID: uC-gsflnu33B142c06b1.pep
ASCRSRPWATSASSPSFFSSLNRSVPVSRCAIPGADSFFRGSPSIVPASVAFMMLFLVGQYAPAFLLPFFGLLSSLF

SEQ ID NO: 114846 - protein, 59 aa, Gossypium hirsutum
  Clone ID: uC-gsflnu33B142e03b1.pep
TRSQMSMNAQKEFVTRNRFSRETKDILGDGIRQPSATSSVRRIHYRTAKYSQHFFHPKN

SEQ ID NO: 114847 - protein, 58 aa, Gossypium hirsutum
  Clone ID: uC-gsflnu33B142e09b1.pep
YIKMNADTHKVLLFLKQNSFWWKKNAKSSSPLINQRIKVRKKEKSINNTRPDAWADAW

SEQ ID NO: 114848 - protein, 41 aa, Gossypium hirsutum
  Clone ID: uC-gsflnu33B143a05b1.pep
NSSTLCCFIYARFISKIKGVKPTRNIKLSNYVLAFRCCIEI

SEQ ID NO: 114849 - protein, 104 aa, Gossypium hirsutum
  unsure (1)..(104): unsure at all Xaa locations
  Clone ID: uC-gsflnu33B144f02b1.pep
MKDLRPQSGALFYITDMALILHAGTTNINAFNALIAAEHTGVHDKMDVNNEMGGXNTTPECIKTNPTGKDPVAGTPEAPAVESNGSAAIEALLKANNPICGATL

SEQ ID NO: 114850 - protein, 69 aa, Gossypium hirsutum
  unsure (1)..(69): unsure at all Xaa locations
  Clone ID: uC-gsflnu33B144h09b1.pep
LGHLILFRLEYIKGFCMRIFLVGFLGCVIYYSLALVIFHLFFFYHLAIGXLLXIVKNIIIIIALVSRYL

SEQ ID NO: 114851 - protein, 102 aa, Gossypium hirsutum
  unsure (1)..(102): unsure at all Xaa locations
  Clone ID: uC-gsflnu33B145b11b1.pep
QGPKDYVHPSPEPLIVLVELKLWSFYRDLIAEFIXTLLLLYVTVGTGIGHKTQQNACDGIGLLGFAXWAFGGMRSILEYCTDGIXGGHIHTALTIESYLAQK

SEQ ID NO: 114852 - protein, 59 aa, Gossypium hirsutum
  Clone ID: uC-gsflnu33B145f12b1.pep
IGVAASIHVMWGIRMSSGGDTTKRAGQIGVTNRRAVRMVGGTRHVACYKAGCCRWLIAW

SEQ ID NO: 114853 - protein, 49 aa, Gossypium hirsutum
  Clone ID: uC-gsflnu33B145h02b1.pep
HYSESRYPGRNTDPNTRDVPPFLDIDQQSYKKGRGNFKSPTRKKNKPSL

SEQ ID NO: 114854 - protein, 51 aa, Gossypium hirsutum
  Clone ID: uC-gsflnu33B145h03b1.pep
KFWSTQVSPLPEFDLPRLRAFSTRLRFRCAPRLALYLSSSRLIINPPLSSS

SEQ ID NO: 114855 - protein, 39 aa, Gossypium hirsutum
  Clone ID: uC-gsflnu33B146a11b1.pep
MPQEGAGSRVCLRNESAFILFTQGAMFGKPMYNNWRHCF

SEQ ID NO: 114856 - protein, 65 aa, Gossypium hirsutum
  Clone ID: uC-gsflnu33B146a12b1.pep
VFRPQEQLVQQQLTPHLRSFSVGTYAATVLVWLFVGLYSHGVTASLHHALTLVRSVTAPARVTNT

SEQ ID NO: 114857 - protein, 61 aa, Gossypium hirsutum
  Clone ID: uC-gsronu33B002a04b1.pep
AGPDSRFAATRPAIVFASAHAYEGPVTVYRHLILQKKKGGGRLLDPGIPFLTLERHGFFFV

SEQ ID NO: 114858 - protein, 90 aa, Gossypium hirsutum
  Clone ID: uC-gsronu33B002a06b1.pep
LRSLYSLLHKSVNRGFHSTCVNRMAGGPGHDEPNHLLSQQHLLFLYRILKIWTAQDSVRLCFSIGVACSYLSCHFPTKKDCPWLLSLLPP

SEQ ID NO: 114859 - protein, 107 aa, Gossypium hirsutum
  Clone ID: uC-gsronu33B002a08b1.pep
SVYRMGDTSRGQGNMKRDLWAHQQLHPEWIQQGALVQTHIQGLMIGMLLEGMLRIGILVSTVAQSLQLIISNNLMALAMTVGTLKNILILHQQISLHMLIHGHIKIR

SEQ ID NO: 114860 - protein, 91 aa, Gossypium hirsutum
  Clone ID: uC-gsronu33B002b08b1.pep
GSPVAITRALARIETNMLQHLCSSIFHRHARHTGVPSPSNSMIIRLSIVTHATSGRSEWMDMPLQAYRCVLLVTQSLTLTAGSSKVPLACL

SEQ ID NO: 114861 - protein, 64 aa, Gossypium hirsutum
  Clone ID: uC-gsronu33B002c05b1.pep
NKDLQTHDLRQGKTLSDAQGPRSYIRDCRTLRQWPSRRNEQKDNRRCRSTNLQRRTIQSERKLG

SEQ ID NO: 114862 - protein, 76 aa, Gossypium hirsutum
  Clone ID: uC-gsronu33B002c09b1.pep
GHHKGRRHRHTRHSVFRVHVSRCRPLGASGSGLDSSSPANTWTFGLQASPQHSNPVLLGTLSILTMWRWDSTVDGH

SEQ ID NO: 114863 - protein, 107 aa, Gossypium hirsutum
  unsure (1)..(107): unsure at all Xaa locations
  Clone ID: uC-gsronu33B002d03b1.pep
KVRSGVFVLGCVVGLYVGCSCVPSVVPLGIRVLLGGGLLGWPSPGVSLCGGPLRLLAGGFSRRWCFPVVSCGSGRAGCFKFPRLVVFWVVLXNGKSVGRGASRGLGP

SEQ ID NO: 114864 - protein, 137 aa, Gossypium hirsutum
  unsure (1)..(137): unsure at all Xaa locations
  Clone ID: uC-gsronu33B002e07b1.pep
HPGRPTLAAGRPREKLREEVEKRAREKILHTREEDKANRRRTARXPHQRRPSAAPKPSATRGAEKPSASPARPATTAEHMRERPRARKQNHKEDDAKATRAVQTLRTYTGKEARKPDEEKWRKRRLNSQPWQERARS

SEQ ID NO: 114865 - protein, 77 aa, Gossypium hirsutum
  Clone ID: uC-gsronu33B002e08b1.pep
CPHKKIYKFPTRGRKIWYFKRGPPFIFFFFYFFIFFFFFFFFFFFFFFFFFFFFFFFFFFFFFFFLEANKLNIICRA

SEQ ID NO: 114866 - protein, 112 aa, Gossypium hirsutum
  Clone ID: uC-gsronu33B002f06b1.pep
LSLPFPCFVCAAARCSSLFCFVGFLVAAVFSPSALVPLFWASSASVWSLVSVSFVVVPSLLVSPCLLPSCGGVSPPGVPFRLLVSFPACVLGGLTVFFFPFPPLFWSVREVG

SEQ ID NO: 114867 - protein, 47 aa, Gossypium hirsutum
  Clone ID: uC-gsronu33B004a05b1.pep
YPATFFFLDTPTQLTPNSKPYPISLKCQWPHSFSLLYNPTHMSPFLL

SEQ ID NO: 114868 - protein, 45 aa, Gossypium hirsutum
  Clone ID: uC-gsronu33B004e01b1.pep
FISIKYIKFCLSPGPQFVLAFLFQKSLRKYLIAPFSSCGSHTKGR

SEQ ID NO: 114869 - protein, 127 aa, Gossypium hirsutum
  unsure (1)..(127): unsure at all Xaa locations
  Clone ID: uC-gsronu33B004e04b1.pep
TIRSNKYADDSANNATYIGALVKGILAADEFTGTIXRLISRINVDNVEDIRQALRELLFTTPGAIEHLICEIIFEETIYQKTASGKPFNDGLKERGVLPDMKADKVTGALNGTHGETLNQRVHGLAQ

SEQ ID NO: 114870 - protein, 117 aa, Gossypium hirsutum
  unsure (1)..(117): unsure at all Xaa locations
  Clone ID: uC-gsronu33B004g02b1.pep
MSGDRISRGPLRRRCGPCDLILLIYFMSSLIGHLMSLFYPYYFFFFXLYYFIFFIFLIFTIFFFFKNFTLLFILFLFFYIXFILLSFLIFLYFLSNLFFYIIYLLIILFLYFFYFIY

SEQ ID NO: 114871 - protein, 37 aa, Gossypium hirsutum
  Clone ID: uC-gsronu33B005b10b1.pep
FFWDPIMDANLIVLNLFGVSMEMSISDYCEMQLKLYQ

SEQ ID NO: 114872 - protein, 45 aa, Gossypium hirsutum
  Clone ID: uC-gsronu33B005c04b1.pep
AIFPNYRVSDTQALVLRMAEPCTDDLRQDAAYFAGITSDFLQVGY

SEQ ID NO: 114873 - protein, 66 aa, Gossypium hirsutum
  Clone ID: uC-gsronu33B005d10b1.pep
SCPERHTQLGGTFYTSCGEMLPTFARNSKPTCLGTIKSQFPERSTPKLLRLKHQRFFNPFPAPDPI

SEQ ID NO: 114874 - protein, 52 aa, Gossypium hirsutum
  Clone ID: uC-gsronu33B007c05b1.pep
MRKIMGAKGLFFFAWLSFSAVSAYAQDEEDQGLALNFYKDSCPHSDDTNKDQ

SEQ ID NO: 114875 - protein, 41 aa, Gossypium hirsutum
  Clone ID: uC-gsronu33B007e12b1.pep
SSNSMSTEHNMHGLAFKSFIVKGSMNPTHLGAILLGKSKLY

SEQ ID NO: 114876 - protein, 51 aa, Gossypium hirsutum
  Clone ID: uC-gsronu33B008c05b1.pep
PHFFYCFPSSDIHFRIRHVIWILILCPLHNSYHLCRICIFSLNLPTFTVSS

SEQ ID NO: 114877 - protein, 176 aa, Gossypium hirsutum
  unsure (1)..(176): unsure at all Xaa locations
  Clone ID: uC-gsronu33B008c06b1.pep
GRVFPNVVKLRAYDWAPDEKLLISDFISNGNLANAIRGRNGQPSTSLSWSVRRKIVKGAARGLAYLHECSPRKFVHGDVKPSNILLDNEFQSYISDFGLNRLINITGNNPDSSSGGFIGGLPYKSIQTERTNSYRAPEARVPGNRATXKWDVYSFGVALLELXTGKSXELSPTTST

SEQ ID NO: 114878 - protein, 91 aa, Gossypium hirsutum
  unsure (1)..(91): unsure at all Xaa locations
  Clone ID: uC-gsronu33B008d07b1.pep
RGSRAHDKDQNGXISAAELRHVMTKPGEKPTDEEDDEMNREAEADGDGQNNYKEVGKTRRPSNFVTNHKEEPNIDTKGNRANKYAKTYISE

SEQ ID NO: 114879 - protein, 73 aa, Gossypium hirsutum
  Clone ID: uC-gsronu33B008d09b1.pep
THILSSTCHTTSCYMSKAANILANRISMLVAAPSSAFFGFALFVFSTRANSCVLYHTATMFPPLAFSVVRTKG

SEQ ID NO: 114880 - protein, 45 aa, Gossypium hirsutum
  Clone ID: uC-gsronu33B008e07b1.pep
GLLVIPDFYSRVYTIAWYPVIDLRGMFLSINTGSIGTYTSKNPSS

SEQ ID NO: 114881 - protein, 77 aa, Gossypium hirsutum
  Clone ID: uC-gsronu33B008e08b1.pep
HPVIYFCNWIYDWPDQFRVECGECSIFTWISPQFSIQLFRRSIGVYKQFMSTILMFGGLLCINNAMDVSACGKHKSY

SEQ ID NO: 114882 - protein, 93 aa, Gossypium hirsutum
  Clone ID: uC-gsronu33B008e09b1.pep
SFVGAMAALDRKLSKTFRDERVQVVRMAMRGTCKNTSEHATTNTGVDMLIEIKPFTLDASRKSPSQMKDSIYVSIIKNESNLCSIYAKLASSY

SEQ ID NO: 114883 - protein, 58 aa, Gossypium hirsutum
  Clone ID: uC-gsronu33B008h04b1.pep
RLLSLYLQVIAILLLLGCLLNPNMVYISKYKTSNTATLLVLSLNIISYEMKLFIYVIY

SEQ ID NO: 114884 - protein, 36 aa, Gossypium hirsutum
  Clone ID: uC-gsronu33B008h05b1.pep
FLGVNSLNYFMVYEIDEWSLQRNFNSNAYMPISCYL

SEQ ID NO: 114885 - protein, 95 aa, Gossypium hirsutum
  Clone ID: uC-gsronu33B009b01b1.pep
KNPGLKGPIKGGVHFPIRVGTFLEGRLGGALLFFSHLGKRGFFPKRISWGTPGVFPARRCKNPAQEIKFGGPKKKLMRCKPGGGNLGPLKGAPPF

SEQ ID NO: 114886 - protein, 36 aa, Gossypium hirsutum
  unsure (1)..(36): unsure at all Xaa locations
  Clone ID: uC-gsronu33B009c09b1.pep
LKVRCCMCLYTLCASDADKGDKLXQPLPAGLRVQDL

SEQ ID NO: 114887 - protein, 94 aa, Gossypium hirsutum
  Clone ID: uC-gsronu33B009f12b1.pep
RKFMIIPVRILVKRDELTLEGIKQFYVNVVKEEWMLDSLCDLLVSLSFSSERDLCLSLLLLSFLSSLFSLFIFKSLYIYFIILYHVYFSFFFSL

SEQ ID NO: 114888 - protein, 30 aa, Gossypium hirsutum
  Clone ID: uC-gsronu33B009g03b1.pep
KQKPLNTPKRSKGRVTKRRQNRLLLKALHG

SEQ ID NO: 114889 - protein, 97 aa, Gossypium hirsutum
  unsure (1)..(97): unsure at all Xaa locations
  Clone ID: uC-gsronu33B009h02b1.pep
PRPRGRXPGSKNKPKPPIFVTRDSPNALEYVWKXKWTDVAESIANCSIRHVSXACLAAGLGPNVTLRHRQTGAGVALMEGENFGFAGAFLPGPLHRD

SEQ ID NO: 114890 - protein, 76 aa, Gossypium hirsutum
  Clone ID: uC-gsronu33B011b06b1.pep
VISYRVRLKNSTKNCGAHKCPIPLITPTDTTNSNSSRFLQILHPFLSLCKMTALYLSPRLMRESMSAKNVLSDERT

SEQ ID NO: 114891 - protein, 76 aa, Gossypium hirsutum
  Clone ID: uC-gsronu33B011e04b1.pep
CLKRARRGTIKMKSMAAVVPLTENPAPASAVGLGASRACAEAAVSIAICSGYRPAFSMLPWAICNTHHQLERLGFF

SEQ ID NO: 114892 - protein, 72 aa, Gossypium hirsutum
  Clone ID: uC-gsronu33B012g06b1.pep
VPLTIQSAQLFEMAIARVLQLYVICRQPGCLTNSVLSIGKRSWVFAHYAIVCTLDASYNVPAQVTLYKIHSV

SEQ ID NO: 114893 - protein, 59 aa, Gossypium hirsutum
  unsure (1)..(59): unsure at all Xaa locations
  Clone ID: uC-gsronu33B014b09b1.pep
RSEKEAAEMNKRSFKYAWVLDKLKAVRERGIXTIDIALWKFETTKYYCTVFDAPGPRAF

SEQ ID NO: 114894 - protein, 49 aa, Gossypium hirsutum
  Clone ID: uC-gsronu33B014c07b1.pep
RTLTGGIVYDLLPLLQIQVCYTTTTPLCIRLTRSCSPLLRHGCDRAPLQ

SEQ ID NO: 114895 - protein, 52 aa, Gossypium hirsutum
  Clone ID: uC-gsronu33B014h04b1.pep
AEIQFGPGYLVIGVTQQFLLTFILAAQYSIPSRHHLKSVAPHPQALASHLII

SEQ ID NO: 114896 - protein, 49 aa, Gossypium hirsutum
  Clone ID: uC-gsronu33B014h11b1.pep
GPGRFFPENQVDNGGGGACEFLCLVRKLTVWRSENVFEIWFIHSLNVPS

SEQ ID NO: 114897 - protein, 99 aa, Gossypium hirsutum
  Clone ID: uC-gsronu33B015b07b1.pep
KKKRKKKKKIHKVRGRWLSRVQALRPGPPMGWLPYWDSLMGFLGRPLTDTWNGNTPPFLGLFAFARIAFSPGGALSAGAAPVALPDIRTVLRAKGPPAR

SEQ ID NO: 114898 - protein, 119 aa, Gossypium hirsutum
  unsure (1)..(119): unsure at all Xaa locations
  Clone ID: uC-gsronu33B015d12b1.pep
MMVINGIGGALLIYPVLRGKWDSGTXWRIADGAILYIVAMLQTAPKGPSGEKKGAHNRERVEGCMKEGWHCKLYLPHYRSIEEWNRHLEKQWSRLAKRKAELDPMCILARGQSITEGTR

SEQ ID NO: 114899 - protein, 80 aa, Gossypium hirsutum
  Clone ID: uC-gsronu33B015h07b1.pep
NPGGLFKKRGWGKTFFSTIVYVGRGMALFLLCEKFYKRPMGNCLSPCGVHLRGEGGGFLRGFNFFWEGFFRTIFHFFFGF

SEQ ID NO: 114900 - protein, 140 aa, Gossypium hirsutum
  Clone ID: uC-gsronu33B016b01b1.pep
FPFKMSPSVGRAPLRALFLFTPMANRVWSAKPFRSGQPRFSPPPMCYPPPFSSFFAAPFKCFLLCSRGLQNLVPCNPPPRVFLSALAVLVVVIVTCSSTCSPFPPLLKYLSRSSSSMRNYLIKRCKKEKPFICQHAYTFS

SEQ ID NO: 114901 - protein, 131 aa, Gossypium hirsutum
  Clone ID: uC-gsronu33B016e04b1.pep
CLARPVSGPDWARPTRRVLFFAKRLKKLRTAHGLYVKCASPTKLYIVTESRLMQINLAFAFDLTVQFLPVPLLKAYLKEARKSLGTWLVLETTFLLLRLSLVSLSWGPLKGHVSRRIVDHHIEEQPPVDPL

SEQ ID NO: 114902 - protein, 45 aa, Gossypium hirsutum
  Clone ID: uC-gsronu33B016e08b1.pep
MSSCYRQASFFFFTWGLNFFVFGLFMFQGKKVWVKRKLVLPDLAI

SEQ ID NO: 114903 - protein, 39 aa, Gossypium hirsutum
  Clone ID: uC-gsronu33B016g12b1.pep
KERNKEVFIFREREREREKMSHNMQVHEIRSIDSILVPN

SEQ ID NO: 114904 - protein, 65 aa, Gossypium hirsutum
  Clone ID: uC-gsronu33B016h06b1.pep
CETVNEMVTQMLNYPLGLTCIRSMIPLMLIQILFHIPEFNTVVRKLIRLIMRSAPGLLPRRLARG

SEQ ID NO: 114905 - protein, 81 aa, Gossypium hirsutum
  unsure (1)..(81): unsure at all Xaa locations
  Clone ID: uC-gsronu33B017a10b1.pep
RAIPFPSFSGRKLATTKRPPPRFFFMAIFFFSFFFFFFFFFFVFFFFFFFFFFFFXLRKLKSNFSFLLNCNNLAIVYEQFE

SEQ ID NO: 114906 - protein, 69 aa, Gossypium hirsutum
  Clone ID: uC-gsronu33B017b07b1.pep
QASCSGVVGSCGSFGYQSSMVFALTPGAPCLLTTSQASRVMFSNLGLPGYLLSPLLYVIIGRPLVRTRE

SEQ ID NO: 114907 - protein, 67 aa, Gossypium hirsutum
  unsure (1)..(67): unsure at all Xaa locations
  Clone ID: uC-gsronu33B017d07b1.pep
VEPEAVAYFNMKTVQIYRRNXPDYPTKPQVHDYKIDLKECGPMDHDALIKMNNENYPMLTFRRSCPG

SEQ ID NO: 114908 - protein, 56 aa, Gossypium hirsutum
  Clone ID: uC-gsronu33B017e08b1.pep
PVRRPRKAHEGAVTSQSPGRHKATRSRRGNSSNSAPAADGFRTGTPVPSPQTGREG

SEQ ID NO: 114909 - protein, 48 aa, Gossypium hirsutum
  Clone ID: uC-gsronu33B018a11b1.pep
CRLFFVIFFWFIFWFFSFFFFFFFFFFFFFFFFIFFFFYTNKREDSHS

SEQ ID NO: 114910 - protein, 50 aa, Gossypium hirsutum
  Clone ID: uC-gsronu33B018h02b1.pep
GSADTNAIILESSRHYPWGGSARNSDVTCKDSYRTKRNCIESHAAPMGWG

SEQ ID NO: 114911 - protein, 70 aa, Gossypium hirsutum
  Clone ID: uC-gsronu33B018h05b1.pep
PCVRPRVRKKKEKFKKGRKIKTKLCNLSWSESLFIAEYRRIPSHIAQTTKILNLIHMHHISLYTDYPITI

SEQ ID NO: 114912 - protein, 103 aa, Gossypium hirsutum
  unsure (1)..(103): unsure at all Xaa locations
  Clone ID: uC-gsronu33B019b09b1.pep
REKTXSNGRKGAAKGRAHPPRKHTNHWEKRTGTGRVPIAKQGKKGVGNNEQEAGGKTRISPGERGIITDRQLKGGRPRKNSLGGEKRRAKKGTQETPPQIYEV

SEQ ID NO: 114913 - protein, 78 aa, Gossypium hirsutum
  Clone ID: uC-gsronu33B019d01b1.pep
GHRPNIPGETHARDINPLRGHDNTGGLEITSPSHPQHVTGTKETTRKHRGTIKNGKTKPISHTPKEDRASKGTTSKRA

SEQ ID NO: 114914 - protein, 81 aa, Gossypium hirsutum
  Clone ID: uC-gsronu33B019h11b1.pep
RNGMRFLKLVMLLPLTMTGPTINISSLPVFILTYNSKMATLRQTRHRKTKHNVDRFFTFVGETMNDQGTGSRINDWKIQRS

SEQ ID NO: 114915 - protein, 55 aa, Gossypium hirsutum
  Clone ID: uC-gsronu33B021a02b1.pep
YRPCRHPSLAIYHFRGLLFLLLSFFHNLWLSSSFSTVAWITRAGLIRACFHVVFR

SEQ ID NO: 114916 - protein, 133 aa, Gossypium hirsutum
  Clone ID: uC-gsronu33B021c10b1.pep
KKKKKKKKKRKNYKKKFSFKKKKKKKKKPKKKKRGGPFKRTQVTAPGQATKKLFNGAPKIKSPGRGLTPRERENPGGTQLKWPGKKSPFPKWGKKEKGPTRPPFQTVAHPKGQRDPPLNGPINPGGFVGTPKG

SEQ ID NO: 114917 - protein, 56 aa, Gossypium hirsutum
  Clone ID: uC-gsronu33B021e01b1.pep
LPKPEAETIEPLHRVDPVYIYRSQLKSSIYMISFFKGGVGKPNLLPPITVGGPLAV

SEQ ID NO: 114918 - protein, 55 aa, Gossypium hirsutum
  Clone ID: uC-gsronu33B021e04b1.pep
LLPLWELARGALFKAAVILPPLILASFCALAAGIIATLRLPDLASSFKSSGSHFG

SEQ ID NO: 114919 - protein, 45 aa, Gossypium hirsutum
  Clone ID: uC-gsronu33B027a10b1.pep
KRYLIFMDTAPGCISFLFYLTSLKHLFYIAHTSAFSSMSSKTRKR

SEQ ID NO: 114920 - protein, 45 aa, Gossypium hirsutum
  Clone ID: uC-gsronu33B027b04b1.pep
QYLFSVSNLSNMASFNCFVLALFMALSFSSVNVVSSYLLYFIFAN

SEQ ID NO: 114921 - protein, 45 aa, Gossypium hirsutum
  Clone ID: uC-gsronu33B027c10b1.pep
LPSKSFLCFLSLFVPLSLDLDLLERCLSSSEFTRLFGFPLFARVI

SEQ ID NO: 114922 - protein, 51 aa, Gossypium hirsutum
  Clone ID: uC-gsronu33B027e11b1.pep
KKSRFRRIRFAFRCLLSHISLTDWLEFSTVASGLPLTVWYFPGCAHFTVLA

SEQ ID NO: 114923 - protein, 62 aa, Gossypium hirsutum
  Clone ID: uC-gsronu33B027g02b1.pep
MTDTERILDSKYGACVNYNQNMQYDEHWMFWDGPFIGDILGAIYDQLILRAHAVKALGSLRS

SEQ ID NO: 114924 - protein, 49 aa, Gossypium hirsutum
  Clone ID: uC-gsronu33B027h05b1.pep
LILINKSLTVFILIKHSVLGNYKVTLSFHILLPIWNYFKRISCTKLDPC

SEQ ID NO: 114925 - protein, 44 aa, Gossypium hirsutum
  Clone ID: uC-gsronu33B028b11b1.pep
LVESRQDVTILSCGHTIHTNCLVGNEGPFSICLFSLLHKWFFII

SEQ ID NO: 114926 - protein, 50 aa, Gossypium hirsutum
  Clone ID: uC-gsronu33B028d08b1.pep
DRVKCVVHYTNYVLGDDTQEGLRAVVVYEVASMPTSARTRDRTRERTRGT

SEQ ID NO: 114927 - protein, 44 aa, Gossypium hirsutum
  Clone ID: uC-gsronu33B028e05b1.pep
ISLGSIAHLRSFRSSDRFLSMYIRQIMQRAMSLKNALGSLRSLN

SEQ ID NO: 114928 - protein, 52 aa, Gossypium hirsutum
  Clone ID: uC-gsronu33B028e06b1.pep
TCRKAKSVVLHTSYSPVESTLVGWRDAMGSILLITPTSLSTFARTHGRTRGT

SEQ ID NO: 114929 - protein, 35 aa, Gossypium hirsutum
  Clone ID: uC-gsronu33B028e07b1.pep
FSRPITREWRRGLANKFKDLNHLKAFLTDVDSYVN

SEQ ID NO: 114930 - protein, 40 aa, Gossypium hirsutum
  Clone ID: uC-gsronu33B028e11b1.pep
DIHDCTLIVNCVIVVALLLLIGGIHHQTGKSRIRVLGATK

SEQ ID NO: 114931 - protein, 61 aa, Gossypium hirsutum
  Clone ID: uC-gsronu33B028f04b1.pep
PCERVISLYVIRLSYKVVSLAYCVYFLFSFLFILCIFFLLSYVIYISFYFCIIFNIIILLF

SEQ ID NO: 114932 - protein, 42 aa, Gossypium hirsutum
  Clone ID: uC-gsronu33B028f05b1.pep
PSFTDQARSIYFLMYFYKILSTDVLDLRSATGLDEMHDANED

SEQ ID NO: 114933 - protein, 42 aa, Gossypium hirsutum
  Clone ID: uC-gsronu33B028f06b1.pep
LNQASLQTAISFSPCPPLRLFILSDRFIAMYITQCTQLAKSL

SEQ ID NO: 114934 - protein, 70 aa, Gossypium hirsutum
  Clone ID: uC-gsronu33B028f10b1.pep
LSDYAFVVYMHVFCLFRPPLVRPYIGHADTDVHNKVYGYGIDRISCSRAVTVYIVGSMTTCARTCGRTRE

SEQ ID NO: 114935 - protein, 36 aa, Gossypium hirsutum
  Clone ID: uC-gsronu33B028f11b1.pep
KVDVKSYVCLACFRIVKVFKVVSMTWCAWTCDRTSE

SEQ ID NO: 114936 - protein, 39 aa, Gossypium hirsutum
  Clone ID: uC-gsronu33B028h08b1.pep
VNYKRLTCNMHHQVSPRRDIDSLVVINTTSFLTDSRTNE

SEQ ID NO: 114937 - protein, 55 aa, Gossypium hirsutum
  Clone ID: uC-gsronu33B028h09b1.pep
NPKTKNKQASKAKQGPAQAHKDHQKVQFNTKQPREDNENKELKAQDKILEILPRI

SEQ ID NO: 114938 - protein, 211 aa, Gossypium hirsutum
  unsure (1)..(211): unsure at all Xaa locations
  Clone ID: uC-gsronu33B029a08b1.pep
FFLFNFFIFFLSYFFFFLILYIFIYFFNLFIFLFILYYFYFFYLLFIFLXYFFYINLYLTFYFYIIFFFSFYFSFFIILFHLFLYIYSIQFIYFLFLLNLIFFYFIIIYFIFSFIFFFLNYYFFIISFILFFNFXLYLLILIINIFLNFLFXIINFLLLYLYFSTFFYFLIYSFIHFFLILXFITLFLFIYLYIFYFLFSYSNIIIFFLLS

SEQ ID NO: 114939 - protein, 48 aa, Gossypium hirsutum
  Clone ID: uC-gsronu33B029a12b1.pep
QKLLLRSSLWAFTRTVSGNFTHSSMFQPSDPRACSTFSPWMRPTSGCT

SEQ ID NO: 114940 - protein, 69 aa, Gossypium hirsutum
  Clone ID: uC-gsronu33B029e05b1.pep
NLRLKKSAVFLIREYLHFLFLKVSTGFSDFEQIFCMLIIFLYLNFLKKNCFYFKILKTLEFQYRKENFL

SEQ ID NO: 114941 - protein, 45 aa, Gossypium hirsutum
  Clone ID: uC-gsronu33B029f11b1.pep
LLSGRTLTGVNMKKFLCGETIAIVYIDARFCLINSKCNTKLPYGH

SEQ ID NO: 114942 - protein, 114 aa, Gossypium hirsutum
  Clone ID: uC-gsronu33B029h05b1.pep
PSRPVGFMDPKLLPLMLMNVTIYHPQMMMMMMNCFKFEFLVILICKYRYYNMYPILSPYHIKIAKFCCYFYLNSFLPYYLLFLISLFLFLSYFLILFLYFSFSSISFISFFYIS

SEQ ID NO: 114943 - protein, 107 aa, Gossypium hirsutum
  Clone ID: uC-gsronu33B031c04b1.pep
MGNRRVGRSVQAYSRKRPTGERGMSPQAPNSGNAKGFPVRNVGKPRPENSIYGPRKRNLLRIMRAPSKHGPPEAAPPFFFSFVGLLVMFFLKIPLFLCFFFFVRTNG

SEQ ID NO: 114944 - protein, 56 aa, Gossypium hirsutum
  Clone ID: uC-gsronu33B031d07b1.pep
VLCFRPYHIRYLHKFFHFYALTEGACFDLPFSLYKSFHSACKIQFPSFLFICTPKL

SEQ ID NO: 114945 - protein, 98 aa, Gossypium hirsutum
  Clone ID: uC-gsronu33B031h05b1.pep
TRSNIMQLLSSYRFSPHIIANLINLPISIFTATRVVVKVVPRNVMVVVHTALFCVSTFGIAVVMEQPPAAIDRGVFVLQHIHFYNLCSQAVTHHHQYR

SEQ ID NO: 114946 - protein, 66 aa, Gossypium hirsutum
  Clone ID: uC-gsronu33B031h07b1.pep
VPRAVHSQSCFPSKLKLLQSIKCPILVLHSPLPITYPIPTLNSQDPNPGAIDPTLIRISIAGTTDQ

SEQ ID NO: 114947 - protein, 84 aa, Gossypium hirsutum
  Clone ID: uC-gsronu33B031h09b1.pep
GIAGWLPSQRRVLTYPLRQSGTSEAKCALHAPSTMLLMMARVRFMCCFSGKIPSRAHDNSAPLCRGGYPHRCRSLFHLLRSHSY

SEQ ID NO: 114948 - protein, 59 aa, Gossypium hirsutum
  Clone ID: uC-gsronu33B032a03b1.pep
LSKNKLRVHTHHHQVALNVRLKFALHGSSGFYTLDVLNDISSPSISVLLLTTHNIIPTW

SEQ ID NO: 114949 - protein, 79 aa, Gossypium hirsutum
  unsure (1)..(79): unsure at all Xaa locations
  Clone ID: uC-gsronu33B032b05b1.pep
TDTATNKQGLLRAGEAKITVRWRSNQSFPAGTDXTHKTIKGQLRYAPISQTLRAWRNTEDHLNNNNTCHFKIAKNPTPT

SEQ ID NO: 114950 - protein, 33 aa, Gossypium hirsutum
  Clone ID: uC-gsronu33B032d11b1.pep
PWSSRHPLETHPEPPSPRRLSGLKFLVANFRSL

SEQ ID NO: 114951 - protein, 85 aa, Gossypium hirsutum
  Clone ID: uC-gsronu33B032g07b1.pep
DTTALRASCFFSVMNALGIVAFAFRGHNSNLEIQATMPSTFKHPGSCFDLDLEPRVGNSLIGMWLFPVDIGGFWGLSPSTATVGL

SEQ ID NO: 114952 - protein, 100 aa, Gossypium hirsutum
  Clone ID: uC-gsronu33B032g11b1.pep
KGKARKGEKERKTQGSTKQNGATNRPMTARSGTHQTAQADTRKHGGKWNTPHRTPGTPHDRGRDPGNATAATPQKIPSPVSVMVLVFIYFSFLFYFFFFS

SEQ ID NO: 114953 - protein, 61 aa, Gossypium hirsutum
  Clone ID: uC-gsronu33B032h08b1.pep
LLTPPEMVSRSRRPLDHAPERRRWPTPSPPVNGQRLGYLTIVPFTGCGICRTESEKSPSWF

SEQ ID NO: 114954 - protein, 37 aa, Gossypium hirsutum
  Clone ID: uC-gsronu33B032h09b1.pep
KDAPIISLPNKLLMQPGIPVPKPHSTNKIYEPSHPSK

SEQ ID NO: 114955 - protein, 93 aa, Gossypium hirsutum
  Clone ID: uC-gsronu33B036a01b1.pep
LKKSIICKIILLASTISIAVFVNSLTMFTFFAIIRVWDARIIGLTWSWSPTFIIWSTQLVLGNIDEIRVNFLQACLWVSEKYMICMADVHQAF

SEQ ID NO: 114956 - protein, 38 aa, Gossypium hirsutum
  Clone ID: uC-gsronu33B036g06b1.pep
DMPCSGALSSADEEGSHGGGDELDSAIEPVCLPIENIF

SEQ ID NO: 114957 - protein, 101 aa, Gossypium hirsutum
  Clone ID: uC-gsronu33B036h07b1.pep
VLNWGLFFGFLFCVFLDLCPKKFGWGSVILGASPIKVFRLGIGYIFNGLFSIGTGYFLVFFCLRVFHLVLKKCLKKILILKFTFFKFFGKVDLFFFIKMFL

SEQ ID NO: 114958 - protein, 57 aa, Gossypium hirsutum
  Clone ID: uC-gsronu33B037a03b1.pep
RRPPHHGDSRRFCDKCHYAYLSLAVIIIQRAGHRATTLAVVIFNPVGRVGPGGNVRG

SEQ ID NO: 114959 - protein, 51 aa, Gossypium hirsutum
  Clone ID: uC-gsronu33B037a09b1.pep
PLLWSFTRIETVSTTFFFSPGNVIDVILSLISTGHTVLQAGHLPTTLGRVI

SEQ ID NO: 114960 - protein, 42 aa, Gossypium hirsutum
  Clone ID: uC-gsronu33B037d05b1.pep
FCPPGSALEYAQYSLSEGYRPNKDRAVFYKSKPYIRNVRRQI

SEQ ID NO: 114961 - protein, 43 aa, Gossypium hirsutum
  Clone ID: uC-gsronu33B037h08b1.pep
QWSHSVDHPPHFHYNLLIMKIRTGCGRPSKSAAGTRRRASLTI

SEQ ID NO: 114962 - protein, 67 aa, Gossypium hirsutum
  Clone ID: uC-gsronu33B038g06b1.pep
PTRPKHCFYPFFPGLLTNLAKAMMMKHESRISLKMQDPVSLKWLLEIYNSICDSNYNTLIILINSIN

SEQ ID NO: 114963 - protein, 49 aa, Gossypium hirsutum
  Clone ID: uC-gsronu33B039a02b1.pep
RAATIHSLRIPTQTHTSPLTITNKKRNQSSSGLYPHFPINSSSDCVSDS

SEQ ID NO: 114964 - protein, 62 aa, Gossypium hirsutum
  unsure (1)..(62): unsure at all Xaa locations
  Clone ID: uC-gsronu33B039b08b1.pep
HCPFHCFSLKXTKSNPKYINLKMKSKTNFSLKRKGDQREIYQISISKIMGSSQKGGQAAPFI

SEQ ID NO: 114965 - protein, 59 aa, Gossypium hirsutum
  Clone ID: uC-gsronu33B039e11b1.pep
LVTTSTHRRTVFFSFLFLLIFCLELSIFSFAVFGFSLFFVSKSLHHHRSCLFYSSYCCS

SEQ ID NO: 114966 - protein, 249 aa, Gossypium hirsutum
  unsure (1)..(249): unsure at all Xaa locations
  Clone ID: uC-gsronu33B039g06b1.pep
VHGIQPDGQMPSDKTVGGGDDAFNTFFSETGAGKHVPRAVFVDLEPTVIDEVRTVTYRXAFSPXHLIIFMVDPSFNFPRVHYSFALTDPIFFFFPLLSYFCLFSPSFLLFYSFFLSSPFPSFFLSFLFLFSIFLFFFLHFFSSYSFSFLFYFSTLSFLFFLSLYLFYFFLLLSSFFLFFFTFFYFFYFLFFFHLFTSPSFLLPLLFLSYFYFIFLLFISFPFFSFFFFSLPLFSSLLFFFSFHFFSSSF

SEQ ID NO: 114967 - protein, 33 aa, Gossypium hirsutum
  Clone ID: uC-gsronu33B039h11b1.pep
LNCLRFNLRLCPKGRFLYLGLGNTDRLLVRPDA

SEQ ID NO: 114968 - protein, 69 aa, Gossypium hirsutum
  Clone ID: uC-gsronu33B039h12b1.pep
TKKKEKSTPQREIIGGPTQRFKPPHHGRKNTPPPKSFLRAPPKKKKSGPPKRLREPRRTQQAGPPPKQT

SEQ ID NO: 114969 - protein, 37 aa, Gossypium hirsutum
  Clone ID: uC-gsronu33B040b06b1.pep
RGNYGHRPCRQTSLKINHYRGQFGRVGRKGRFRTRCL

SEQ ID NO: 114970 - protein, 39 aa, Gossypium hirsutum
  Clone ID: uC-gsronu33B040c03b1.pep
FPASDSFVGQLMDNEHEKQYKFSDVEPVENEALDHKEEM

SEQ ID NO: 114971 - protein, 62 aa, Gossypium hirsutum
  unsure (1)..(62): unsure at all Xaa locations
  Clone ID: uC-gsronu33B040g09b1.pep
THAXRTNNKNPADYRPVITHQALLAILDSPVNKAGRLQAEYVRTGKGVLFEVKPHVRNCGPY

SEQ ID NO: 114972 - protein, 75 aa, Gossypium hirsutum
  Clone ID: uC-gsronu33B040h02b1.pep
LHPQLKQWKSILPDVQAMLDDAEEKQIKNESVKKRLEDLQDLAYDVDDILDEFAYEELRNKLKKLQVHASTSKAL

SEQ ID NO: 114973 - protein, 230 aa, Gossypium hirsutum
  unsure (1)..(230): unsure at all Xaa locations
  Clone ID: uC-gsronu33B041e08b1.pep
KKKRRKKKKERKGKENKRRRKEKEKKEGERGEKRREKKEKKRERKEKKKREEEKERGREKIKGKKGDNAHPEKKEKTREKGKVITKDKINKEEKKKPQKTQKQGEKGREKRGKDKKRERPENQPRXPNKKRGGTKKQESKXKSREKGNQREPRRRKQKKGKKGEEAKGKRGKQAKGEPGARGKKGGPPRENQAPRWKTTARELKEGDPRKQKRGAKKRGRKQGTTKAAAL

SEQ ID NO: 114974 - protein, 51 aa, Gossypium hirsutum
  Clone ID: uC-gsronu33B041h02b1.pep
LNSRPNPPVCNMNGNAYSHPNVTVLHSILTYCSPCLFCDEINDAMVIVSTS

SEQ ID NO: 114975 - protein, 38 aa, Gossypium hirsutum
  Clone ID: uC-gsronu33B042a02b1.pep
NIHCYGNVSLLNLYICTFHTFVNIILMLNRTIVFFICI

SEQ ID NO: 114976 - protein, 71 aa, Gossypium hirsutum
  Clone ID: uC-gsronu33B042a03b1.pep
ELSCTITETEPQKFALPVDSEHKATEFHLFSAAAPYMLSVSPSPGSHFFFCSCSHLCLFHSSFFFLFFFLF

SEQ ID NO: 114977 - protein, 22 aa, Gossypium hirsutum
  Clone ID: uC-gsronu33B042b08b1.pep
CLLQLSRNFIYVSYLYFTLRHR

SEQ ID NO: 114978 - protein, 50 aa, Gossypium hirsutum
  Clone ID: uC-gsronu33B042c11b1.pep
MNTHKSFFIYPSGSFVCFSYESLFVFFLFIFFIFFYFLFFILSFFFFSFL

SEQ ID NO: 114979 - protein, 51 aa, Gossypium hirsutum
  Clone ID: uC-gsronu33B042e01b1.pep
DSLTDDTGERCKMKLVIHRVLLRVTLAGPVVYRTMGLGCSLFLRTVSTKKD

SEQ ID NO: 114980 - protein, 56 aa, Gossypium hirsutum
  unsure (1)..(56): unsure at all Xaa locations
  Clone ID: uC-gsronu33B042e10b1.pep
MGPLILSAFFFFFFILTXLFFFFFFFFFFFFFFFFFFFFFFLLKSILSVRFTGRVG

SEQ ID NO: 114981 - protein, 134 aa, Gossypium hirsutum
  unsure (1)..(134): unsure at all Xaa locations
  Clone ID: uC-gsronu33B042e12b1.pep
SYLFLSGYGLHLFFFSVFFFFFFFFLYLYFIIFNLGVCFGFLVSSFLFIILFIVTIXFLSFFFFLFKFLYFFILSYFFLFYFFIFFIFFYFVLVFFFYSFIYYFFFIYFIFSIILFFLYLLFFIIFLFFIIFFV

SEQ ID NO: 114982 - protein, 89 aa, Gossypium hirsutum
  unsure (1)..(89): unsure at all Xaa locations
  Clone ID: uC-gsronu33B042g04b1.pep
VLVFIIFYIFVLFLLFYLFPLLYLSLYFIFSNFXFIFIFLFIYFLFIYINILILYIFFLLSLFNLFLFNFVSSYFNVFLYFFLLISLSL

SEQ ID NO: 114983 - protein, 82 aa, Gossypium hirsutum
  unsure (1)..(82): unsure at all Xaa locations
  Clone ID: uC-gsronu33B042h09b1.pep
REFAFNFSFVKGYLLSTFLFFIIFFHFVSNHINIYFFKLFVFFFIFFYFFSLFFYFLHFYHFLXIFFNIYLCFLTILFFYFF

SEQ ID NO: 114984 - protein, 43 aa, Gossypium hirsutum
  Clone ID: uC-gsronu33B044b04b1.pep
PLCPLVLASDGLWDVVPNEEACFLCSREKKTVNPSKTAKFTCL

SEQ ID NO: 114985 - protein, 48 aa, Gossypium hirsutum
  Clone ID: uC-gsronu33B044b08b1.pep
INNMNILRYIRFWNLTSYHYHSILHVQLYELHVHYDEPRYQQQPQPVR

SEQ ID NO: 114986 - protein, 45 aa, Gossypium hirsutum
  Clone ID: uC-gsronu33B044d02b1.pep
SEAITKFHGCKKNTLGCFINAFSVCSAMVDQHCKKCGAAAASAGK

SEQ ID NO: 114987 - protein, 39 aa, Gossypium hirsutum
  Clone ID: uC-gsronu33B044d11b1.pep
SDVTLILPYLFYINILFYFTSITNIYILSLLHIKLLLIY

SEQ ID NO: 114988 - protein, 67 aa, Gossypium hirsutum
  Clone ID: uC-gsronu33B044e09b1.pep
LMSCVASMPLACLVPLFVPNYGCIEQCTLRHQLCSSGRTLSRSDSLKPSPSFTKTQRSSFSVGSYSP

SEQ ID NO: 114989 - protein, 39 aa, Gossypium hirsutum
  Clone ID: uC-gsronu33B046a07b1.pep
SPMRAKQLCVSDKPFCAYSWPSSRFDESTSTDDAHIDEI

SEQ ID NO: 114990 - protein, 46 aa, Gossypium hirsutum
  Clone ID: uC-gsronu33B046a12b1.pep
IRGLYLKARGWKAGVSKQGASYRAAPFNSSSFSNSCARFYVFLQFS

SEQ ID NO: 114991 - protein, 49 aa, Gossypium hirsutum
  Clone ID: uC-gsronu33B046d04b1.pep
VNRKLNYNYLKKLYVTTLIAPINGVINSKLLTSLLKVKGVKLYRIKVQG

SEQ ID NO: 114992 - protein, 69 aa, Gossypium hirsutum
  Clone ID: uC-gsronu33B047a05b1.pep
TKVQTRSKEYRQTSIKEGTHHTNNGVIFVGKQFEDGRTLADYNIQKESTLHLVLRLRGGMQIFSKTLTG

SEQ ID NO: 114993 - protein, 60 aa, Gossypium hirsutum
  Clone ID: uC-gsronu33B047a06b1.pep
QETKRTKNSRYHLLLSGSSTNQYAILRPQNHATVNLKSNLKRTVHDVLIKQGAKGRNLAQ

SEQ ID NO: 114994 - protein, 69 aa, Gossypium hirsutum
  unsure (1)..(69): unsure at all Xaa locations
  Clone ID: uC-gsronu33B047a10b1.pep
SVSSTRTLTGKTISFEVESSDTIDNVKAKTLDXEGIPPDQHRLIXAFYSLEDGRTLSRYHIFIGRLPSI

SEQ ID NO: 114995 - protein, 86 aa, Gossypium hirsutum
  Clone ID: uC-gsronu33B047g07b1.pep
PIRPLTYLNRDHLVSYEIKRALAMILATFYTITVALVRKSPVSSCTSKGQAPDRCPTSNTKCIAAPLGPHSGIVCDMEQPLSPRFA

SEQ ID NO: 114996 - protein, 55 aa, Gossypium hirsutum
  Clone ID: uC-gsronu33B047g12b1.pep
EENKTSTPPGWSTKRLVTLKTLSAMSIQQSLARLCSEPSSKVCTPLSPPITRTRE

SEQ ID NO: 114997 - protein, 34 aa, Gossypium hirsutum
  Clone ID: uC-gsronu33B048b10b1.pep
EEKREKREDETIGGGVKHERRENLSIMVDRKKNA

SEQ ID NO: 114998 - protein, 60 aa, Gossypium hirsutum
  unsure (1)..(60): unsure at all Xaa locations
  Clone ID: uC-gsronu33B048f09b1.pep
KYRKQENSLLFFSLXLQILFYNTLRISTSYLENLCVQHLLSLYPWITLSLTLLPFLSLVS

SEQ ID NO: 114999 - protein, 46 aa, Gossypium hirsutum
  Clone ID: uC-gsronu33B048h04b1.pep
TSALNRSKNVPHGYFTRLTADEAATLTEHTRNLFCLTVGDRTTAHN

SEQ ID NO: 115000 - protein, 88 aa, Gossypium hirsutum
  unsure (1)..(88): unsure at all Xaa locations
  Clone ID: uC-gsronu33B049b03b1.pep
GVLSVIALTAPVEATLPVLNGMDPSKHAWHVVTDKLNHGAVNMWLLIHPPGEATIPVENVDESKWLKXSYWPVLRPRKTASLKVFYFE

SEQ ID NO: 115001 - protein, 43 aa, Gossypium hirsutum
  Clone ID: uC-gsronu33B049e05b1.pep
SWTDDYASASFSFDTKIWTLASVWPCLILRRALTQVFVRFDNV

SEQ ID NO: 115002 - protein, 112 aa, Gossypium hirsutum
  unsure (1)..(112): unsure at all Xaa locations
  Clone ID: uC-gsronu33B049g02b1.pep
ILVSTAQSMTERPMKGMLTDPVTILNWTFVRNDQPRFQTCYQIALAIKDEVEDLEKAGINVLPIDLNLLFREGSPXLLKTQHSSYFTILMSTLFFDHLPFLSHQLHLHFSYP

SEQ ID NO: 115003 - protein, 31 aa, Gossypium hirsutum
  Clone ID: uC-gsronu33B049g09b1.pep
SIYQCRSIVSHFVNEGVKVSEYTSSMQFILY

SEQ ID NO: 115004 - protein, 77 aa, Gossypium hirsutum
  Clone ID: uC-gsronu33B050c05b1.pep
ILIRSCTSPVSKRRPSSTILTSIIQIDHPEFSQSCTSQGSTAPHGVNVVSSAYSNGYCPKKVVISTHSLSKEIISYN

SEQ ID NO: 115005 - protein, 39 aa, Gossypium hirsutum
  Clone ID: uC-gsronu33B050c06b1.pep
CSSHCYMLKKRRRHSMERECLGMNSDVPTSGCSIDRCLS

SEQ ID NO: 115006 - protein, 66 aa, Gossypium hirsutum
  Clone ID: uC-gsronu33B050c07b1.pep
EALFLTILTSICPWNLLNFPQACSTLGMYSSTRCSRHFFSLLQWLLPKDSSYIAFLHNHRHHVVRL

SEQ ID NO: 115007 - protein, 151 aa, Gossypium hirsutum
  Clone ID: uC-gsronu33B050c12b1.pep
AHQKKRAKRGETPPPPRLKSQIKGGYQFPKKKGKLWEKPPGRAPLILPHTAKKGIFPKPIKWGKPRFFQTPRFKKQPQKIKFGATKKKLITPKYPEEKMVPQKGPPPLFRFHYKRAMMLHARVRNSVSFYIFLPFFFFLFFFFFFFFFGRV

SEQ ID NO: 115008 - protein, 77 aa, Gossypium hirsutum
  Clone ID: uC-gsronu33B050d07b1.pep
DSYQVCTSPVTKWDSSCTIYTSIYQWIILKSPQACSSIGMTAPYGVVVISSAYFNGYCPKKGVISPNSVSVEIMSYA

SEQ ID NO: 115009 - protein, 85 aa, Gossypium hirsutum
  unsure (1)..(85): unsure at all Xaa locations
  Clone ID: uC-gsronu33B050e08b1.pep
CSRMNIDLHTNRRIIXDSHIYHTRGSAPGYAELSSHLKKRIQMGXGRALSCMLQQEERVLHMDLAADELLIKVVQIEVEQETLAM

SEQ ID NO: 115010 - protein, 81 aa, Gossypium hirsutum
  Clone ID: uC-gsronu33B050g10b1.pep
SDVKMAYLVVCDVLATKGLMFDWKRFRRQASLMLPKSLVIYNRSQVCYARTSTLRLEIVALQQWVELYVYVKIIQEPHLRI

SEQ ID NO: 115011 - protein, 66 aa, Gossypium hirsutum
  Clone ID: uC-gsronu33B055e05b1.pep
KIKIIKKKKKKKRKKEKKKKKKNKKKKKTKKKGGGRFRRPRVSSPCFVTKKLFWGGPLNKINGRSV

SEQ ID NO: 115012 - protein, 42 aa, Gossypium hirsutum
  Clone ID: uC-gsronu33B055h05b1.pep
HSSFQNGLRQGTDALNFKRRVHKHAICGIPLPFLIFTIYPLI

SEQ ID NO: 115013 - protein, 86 aa, Gossypium hirsutum
  Clone ID: uC-gsronu33B057a01b1.pep
CAASIIIGLAVKMIAFIVGSEFFILLGSQFKSHSLVWICSNSSWLRSEAAALMRCSFCLSFPAVNIKLMTLKNAAELYWLGWSMIR

SEQ ID NO: 115014 - protein, 116 aa, Gossypium hirsutum
  unsure (1)..(116): unsure at all Xaa locations
  Clone ID: uC-gsronu33B058b07b1.pep
SLKTEVEIIKEWNVXLQDPILKVEKQDSAIVEWDRRILHNRDVLSRIEIDEAKVVETQARLEPTTAXIETHQQEVDNALQRMEKEAERIYKDDHGSVLEDEAASTREAMYDQAENV

SEQ ID NO: 115015 - protein, 59 aa, Gossypium hirsutum
  Clone ID: uC-gsronu33B058d12b1.pep
PSDMAITFIVTFEQLFAFGAHSLGTQSMIVHLNIPVPFISLCCYVGHPPIPSYLAFSYI

SEQ ID NO: 115016 - protein, 39 aa, Gossypium hirsutum
  Clone ID: uC-gsronu33B058e04b1.pep
RAPPFLSFFFFFFFLFFFFPFFFFFLYFFFFFFFFFFLI

SEQ ID NO: 115017 - protein, 85 aa, Gossypium hirsutum
  unsure (1)..(85): unsure at all Xaa locations
  Clone ID: uC-gsronu33B058g08b1.pep
MNGNSSPTHLPTHSSLTYSNANLDRVLYNDLVEMIPLVQSLIERKPSSSFTRRGSMIYTKTPSRESLXEMFTDMKGRNGAQSIPM

SEQ ID NO: 115018 - protein, 134 aa, Gossypium hirsutum
  unsure (1)..(134): unsure at all Xaa locations
  Clone ID: uC-gsronu33B058h02b1.pep
VLKQLKKVAARGFYTDTAYSPPTEGPTHDEIDMKILGNLSSDPYIVHTKEFTQGNGNXDQQFXRWFDTTXNFHTYSNTWKPQHIINSDENTPNRVCKKAESIGVPFXKSQPMKIYSRLSNADESGTWSGLGKTD

SEQ ID NO: 115019 - protein, 50 aa, Gossypium hirsutum
  Clone ID: uC-gsronu33B060d01b1.pep
RPRFRPLACANRTQGTPMEHALEEVTHLQNHLRSCLLRDSYTCRVLTTVH

SEQ ID NO: 115020 - protein, 103 aa, Gossypium hirsutum
  Clone ID: uC-gsronu33B061a09b1.pep
FSSRAMLLLKLLHPLMEFLLVTVVFSPSLVEDIALQFRLISPAHEAFVHMSSQQNSSDLSLAFYMFGNRGRCYTHHVPSWESLVPIIDFGICLTVINSFRPIH

SEQ ID NO: 115021 - protein, 35 aa, Gossypium hirsutum
  Clone ID: uC-gsronu33B061d11b1.pep
PFPDLFLERKFALLSLNPYVQFPCSADLRKTIYLP

SEQ ID NO: 115022 - protein, 75 aa, Gossypium hirsutum
  Clone ID: uC-gsronu33B061h04b1.pep
RVGFGGEDPGVFLMDYVEGGVVKSKSSIWILKAMTDFLWAIINCIERHFLNMLSMDMDVAYRKGFGLSEKCDFAV

SEQ ID NO: 115023 - protein, 77 aa, Gossypium hirsutum
  Clone ID: uC-gsronu33B062b07b1.pep
IYIKDPSTYCITNPGAPFLCPQLSFPYFSTFHLFFRVPFFNSPFPFFSTFPSRKPLAVPHYYSSFHPIPLFPLVAFS

SEQ ID NO: 115024 - protein, 98 aa, Gossypium hirsutum
  unsure (1)..(98): unsure at all Xaa locations
  Clone ID: uC-gsronu33B062d02b1.pep
KRAPNLKRRVFCIDVIAECIVNGPKPALYKEVEAFQGLLKSDTSKSLIHIFFAQRGSSKVPGITDRGLVPRKVNMVAIXGGGLMGSGIATGLLFSNYT

SEQ ID NO: 115025 - protein, 95 aa, Gossypium hirsutum
  unsure (1)..(95): unsure at all Xaa locations
  Clone ID: uC-gsronu33B062d05b1.pep
SLYSTSRRGGEYRRGRALPAGHGLRSRTRVLLFQTPLDXKGSIPSSTYLMTYKIGDYVDVKVNGAVHMALPHKLYHWRTVRVWNITMRAIRDVVI

SEQ ID NO: 115026 - protein, 117 aa, Gossypium hirsutum
  unsure (1)..(117): unsure at all Xaa locations
  Clone ID: uC-gsronu33B062g06b1.pep
LLVDPRNRFFGTTTLAFIWKKGLMVGGDIKASIGDYXSSQSVKKKIEMKPYMLGTMAGGAADCQFRDRKLGIKGRMQEQANKRRNSGTGAXKTXANILYYYRGMGLLVGTMIAGWDE

SEQ ID NO: 115027 - protein, 68 aa, Gossypium hirsutum
  unsure (1)..(68): unsure at all Xaa locations
  Clone ID: uC-gsronu33B076d04b1.pep
TLAPFFKFIFQKLFRVGQIKPKIIIYFPRLSYCLKLSFFFFTKFFKILLSTVISVTYPFYFFLXXFLI

SEQ ID NO: 115028 - protein, 57 aa, Gossypium hirsutum
  Clone ID: uC-gsronu33B076d06b1.pep
KEGFEEGERWLVTGHRMNYDFLIKGEPSGDSRVGKSNLLLGFTRNVLQPRLPLRDQR

SEQ ID NO: 115029 - protein, 37 aa, Gossypium hirsutum
  Clone ID: uC-gsronu33B076h08b1.pep
RPSYALLGFAFPGETHAASIAGNALPPLTIYIGRTIR

SEQ ID NO: 115030 - protein, 105 aa, Gossypium hirsutum
  Clone ID: uC-gsronu33B076h09b1.pep
YYTHYIIAFFRLLEVHIRPQVLEVPGDLHLVPVNFFWFFVLKLQYNNVVVPFSDFQEPTIGVDVSSGGGRHITTIELYPHRYPLLEACCYKQVNLILLARPQVLL

SEQ ID NO: 115031 - protein, 89 aa, Gossypium hirsutum
  Clone ID: uC-gsronu33B077c02b1.pep
QGAILINLEGDNTQFKQRAYYTNTTSILGWAQRVYIATGLTSEGGDSALHSLLMRVIIGNKMKVGAYTYMKRAHHILGFAGANTPHGLK

SEQ ID NO: 115032 - protein, 94 aa, Gossypium hirsutum
  Clone ID: uC-gsronu33B077g07b1.pep
RFERKLKRAAVPKSPHPLAQSIGSDGGKLVPSVCSGPIVSFSNSASIMLLIFHVLRTAAIDEEKETRKSGLIKNGKEFFEKRFYREFNSLQFVL

SEQ ID NO: 115033 - protein, 140 aa, Gossypium hirsutum
  unsure (1)..(140): unsure at all Xaa locations
  Clone ID: uC-gsronu33B078c04b1.pep
PTRSALDRERPRYLHILTRICDRTLTDKTLSLEGDRPKTSDSVXVTMQDKEGLLPTHAXLIFAGKDLDDSRTLAGFCMQTEIHCSHCLARRGGAVKRKKKTYTKPKKIKHKKKAXQLAGLQLYKADEPGKVQRLGTACPN

SEQ ID NO: 115034 - protein, 50 aa, Gossypium hirsutum
  Clone ID: uC-gsronu33B078e10b1.pep
IFFSSRTWNPNFVLFFFFFFFFFFFFFFFFFFFFFFFFFFFFFFFFFRRG

SEQ ID NO: 115035 - protein, 96 aa, Gossypium hirsutum
  Clone ID: uC-gsronu33B079a02b1.pep
PRVRTRVRPRDQGETKLGWFFDSNRTKTRLAGSIRTKPSLQQEPIMDAHTHAASINTCQRLALRAPTIHDQRCRGCQAEQAMEPAPDNGNLKKISH

SEQ ID NO: 115036 - protein, 86 aa, Gossypium hirsutum
  Clone ID: uC-gsronu33B079b01b1.pep
FLSRVLLVFFFLISWLSCHLPFHFPFFALFDFCLPGLCLFLSRPGSFPPSAFYFHLVFSSLVPVAPLIVLLMASLCSLVPLLPYLG

SEQ ID NO: 115037 - protein, 47 aa, Gossypium hirsutum
  Clone ID: uC-gsronu33B079c02b1.pep
IPGAAIVSHIVCAALPPFQSAFRVYLLANSVSLGSPHCFTTWLLVTE

SEQ ID NO: 115038 - protein, 83 aa, Gossypium hirsutum
  Clone ID: uC-gsronu33B079c05b1.pep
LRSCPPAFSSWMFLVDGVLPWHSPPDLRLYIVFVSSRRVVDHPCRWGSLVTHEGARVGGLGPAKLSFKAPPLGCFSLRGGIPF

SEQ ID NO: 115039 - protein, 65 aa, Gossypium hirsutum
  Clone ID: uC-gsronu33B079e01b1.pep
LSVTTTRSVGTNGEQKHHYSVKMNPVLILTDKTGETLSATRKGAKPYMMECINARTIWLTMGDTG

SEQ ID NO: 115040 - protein, 34 aa, Gossypium hirsutum
  Clone ID: uC-gsronu33B079g01b1.pep
SILLELTLIACGSDNPSSKGPTLIKCFIDGSLEC

SEQ ID NO: 115041 - protein, 82 aa, Gossypium hirsutum
  Clone ID: uC-gsronu33B079g11b1.pep
SVLPSFFKSAATDILLDQILSAQDKSMGLVAMCEQPASFGAQVPLLSSKWLIHIFVRSQSFCCTRPRHSHHYSPGRHPSIPF

SEQ ID NO: 115042 - protein, 92 aa, Gossypium hirsutum
  unsure (1)..(92): unsure at all Xaa locations
  Clone ID: uC-gsronu33B080c12b1.pep
TVQFHLLLSRKAFLQEGDFSSVDMNFLRCLILSRYSSKSQLISSFHPHPVQYLSCHKFPKLLPLMISYXRLRLGGVKPQNXLNNTLPVVFDS

SEQ ID NO: 115043 - protein, 89 aa, Gossypium hirsutum
  unsure (1)..(89): unsure at all Xaa locations
  Clone ID: uC-gsronu33B080e04b1.pep
FGYPQVFPFFQFLNAGPLILFLGPHFNIFSLHAWVAKVWTPKTAPPXXFFFFFFYFFFFFFFFFFFRRNYKYFINCSLSYFLFQSPYAW

SEQ ID NO: 115044 - protein, 81 aa, Gossypium hirsutum
  Clone ID: uC-gsronu33B087a01b1.pep
AVCLIHGVAFRVHNISFCHPGSEEIYPCSQYNVCKNVVADKLTTVIPCVLKKQNIVLKTHARLSFSYPYPELDIYQLRLEN

SEQ ID NO: 115045 - protein, 74 aa, Gossypium hirsutum
  Clone ID: uC-gsronu33B087c10b1.pep
FVSLKHLEKHREGSFLCQGRSIMQPLDHHQLGGLRPQCQPTFSGHSLVHEDPVTQSYEVVPTPLEKQAQSLYCS

SEQ ID NO: 115046 - protein, 81 aa, Gossypium hirsutum
  Clone ID: uC-gsronu33B089d02b1.pep
ANQKGDAILKKRKSQDRSDEHCAKISKNCKEAPPDNGKENDAESTLPENPEPSLATKMARHNDRNMQAHNPAGKERTANDP

SEQ ID NO: 115047 - protein, 79 aa, Gossypium hirsutum
  Clone ID: uC-gsronu33B089f12b1.pep
KRYPCTMGLDSHLPLISPSDPERSYMYYIIEKNHIVVINIYNSVTTIITEQWQKNCDHYRDLCDINYNAHQINYDFHTY

SEQ ID NO: 115048 - protein, 52 aa, Gossypium hirsutum
  Clone ID: uC-gsronu33B089h07b1.pep
SHVIMSYSLHWVCTNLMSVDFGSFKPPILLGFEAYVWRYNKGEESIYPRLNL

SEQ ID NO: 115049 - protein, 110 aa, Gossypium hirsutum
  Clone ID: uC-gsronu33B090g01b1.pep
IFLFWHHICLMGGTINKEGGPMSWNQSNSLSSLTRGSISGGRTIAKEDQLPNSGGSNDVSNTRSNRSNLSMNMVDEEPVNESPEFEHFFQEKYWKGAPLSPCTEPTEVGN

SEQ ID NO: 115050 - protein, 96 aa, Gossypium hirsutum
  unsure (1)..(96): unsure at all Xaa locations
  Clone ID: uC-gsronu33B090g12b1.pep
GPFLISFLIHAPLYFLLQSALRKWEGFWKISVASTIISGLGFSGWTESLPPKPKWDRAKNVDIPGVELAKSAVVLPLVWNXHEIIWINICVYHRLL

SEQ ID NO: 115051 - protein, 50 aa, Gossypium hirsutum
  Clone ID: uC-gsronu33B096b08b1.pep
KNQNNKISQHYHNFPTTQKQIGKPKIQQTQTSKEHNKYKADQPKALELQS

SEQ ID NO: 115052 - protein, 40 aa, Gossypium hirsutum
  unsure (1)..(40): unsure at all Xaa locations
  Clone ID: uC-gsronu33B096b10b1.pep
LIHTARKNRERGGGLFKRQCPFLPPXTLHSKSHTNLNPLK

SEQ ID NO: 115053 - protein, 162 aa, Gossypium hirsutum
  Clone ID: uC-gsronu33B098c01b1.pep
MDVFEFDSKPQFIHLTAPKPFEFAPQITELSAGKPPAPSNSSSSSHNRKPSLKISLPHKVEWIQFRKPYSTKAQPTNSNSEDKNKHYRGVRQRPWGKFAAEIRDPNRRGSRIWLGTFDTAIEAAKAYDRAAFKLRGSKAILNFPLESRKLDVTAVDGERKRS

SEQ ID NO: 115054 - protein, 73 aa, Gossypium hirsutum
  Clone ID: uC-gsronu33B098d11b1.pep
KPPPPQVLFFFFFFIFLLFFFFLFLVFFFYYFIFFFFFFFFFFFFNTKANTMLFGQTNFIKKTKRAALAISDE

SEQ ID NO: 115055 - protein, 80 aa, Gossypium hirsutum
  Clone ID: uC-gsronu33B098g06b1.pep
PCLLLFLLGPREFCISAIIFWGLQGFLCISRPPLVFISFNFHFSILMLFFLFFPFIFFFSFFFFCFFFFFFFFFFFFFFS

SEQ ID NO: 115056 - protein, 117 aa, Gossypium hirsutum
  Clone ID: uC-gsronu33B100b05b1.pep
PLRPLKKKKKKKKKIKKFKKKNPKNTKKKKHKKNQLLWGRALFGAPGFPPRACGSIAFLLGPPYFQFWGPRFSPFGLGNPGGLPFLCPCITSPFSLALSWLGGPPPLLFLFFSTPLL

SEQ ID NO: 115057 - protein, 122 aa, Gossypium hirsutum
  unsure (1)..(122): unsure at all Xaa locations
  Clone ID: uC-gsronu33B100e05b1.pep
KGKGKRKKKKQEEGTEEEQKEEIEKKSEEEKGKEGGDGGKDRKRKKERKEGDTHPPRARRDRKKGRTHSQSRGTNEGEGQRGRDPSQKRXGRKGGDKQKKKDGEKQGFPTNHGGRGRPGKCQ

SEQ ID NO: 115058 - protein, 57 aa, Gossypium hirsutum
  Clone ID: uC-gsronu33B104e10b1.pep
KSHPLFFFIFFFYFNFFFYYLLIILKIFLFIFFFFFFFFFFFFFFFFVFFFYDEQRI

SEQ ID NO: 115059 - protein, 55 aa, Gossypium hirsutum
  Clone ID: uC-gsronu33B104h09b1.pep
GPPKKRERGGKQGDGTRGPLKRPPLSFIFVFFFFFFFFFFFFFFFFFFFFFFFFF

SEQ ID NO: 115060 - protein, 80 aa, Gossypium hirsutum
  Clone ID: uC-gsronu33B107b07b1.pep
NSSNMLLYTNTYMYRHTGSQHHGTFLIHVLKLAYITLSRHRSLDHVPNIIHILSSSSPLGQDAGICILKLIGLPNIVKRL

SEQ ID NO: 115061 - protein, 108 aa, Gossypium hirsutum
  unsure (1)..(108): unsure at all Xaa locations
  Clone ID: uC-gsronu33B107f07b1.pep
ASRSVTDTGAGDFKRVFDVNVLGGFLGAKYAARAMVXGKKGCILFTSSIVSKIRVGLPHAYKASKHAVAGLTKSLSVELGEHGIRVNCISPHPILTPLLQKSIENIDK

SEQ ID NO: 115062 - protein, 74 aa, Gossypium hirsutum
  Clone ID: uC-gsronu33B107g03b1.pep
FHVVNRMAKAAPLVHYTIRFQSHDSDRNVVSYRQAQHDRMQYQTIIIPIDERPPGPRRAMALHIERIGMVSSIV

SEQ ID NO: 115063 - protein, 60 aa, Gossypium hirsutum
  Clone ID: uC-gsronu33B107g08b1.pep
LILGPPFRFEWTRMQVLKRPYRPNSPPARHGRINDHYPIVHELASSPGGIASIRMCIRMG

SEQ ID NO: 115064 - protein, 92 aa, Gossypium hirsutum
  Clone ID: uC-gsronu33B107h05b1.pep
ASSRTATRTILELWRLCLILSLELYLLSQLLSQYDIDPRLEYDDINPTPAIRKLLDWHAMVESNDSITLTIAIHYTCCESPEKVLHYIHHNL

SEQ ID NO: 115065 - protein, 65 aa, Gossypium hirsutum
  Clone ID: uC-gsronu33B108b09b1.pep
SLVCQHNLRDFRIHTTLMKICSYLNGPYAFLIDWRALIMLDAVISPESPSSLVGSIQSFLPTQHT

SEQ ID NO: 115066 - protein, 86 aa, Gossypium hirsutum
  unsure (1)..(86): unsure at all Xaa locations
  Clone ID: uC-gsronu33B108c06b1.pep
PFFRLCYNPNRYXWVYSNTEGSIKIWDLASASILGDLTADLKAEANKSDVADHANKRKVIYCTRLNWRADGSTLFSGYTDGDVRAC

SEQ ID NO: 115067 - protein, 117 aa, Gossypium hirsutum
  Clone ID: uC-gsronu33B109a01b1.pep
TILYKQREKKKKRGFKQKIRGRKTELQRCFNSGRIIVGVALLFPDLADGSSFLTTCFLTGHHPTLFGLPFMCRPSKPSSFDVSDDLLFIQFWLILFVFTILHELFPVLGTPLSCVHG

SEQ ID NO: 115068 - protein, 99 aa, Gossypium hirsutum
  Clone ID: uC-gsronu33B109b10b1.pep
LVLPSRIHPARPLVRTKKKKKKKGGIYFKSIVGVSKTLKQFTCYKITLVSCLLDSISLAFSLHRGAWVYPAPSPPSRACISSALFFVPLFAIRPLSFFP

SEQ ID NO: 115069 - protein, 73 aa, Gossypium hirsutum
  Clone ID: uC-gsronu33B109b11b1.pep
LYSSRVSSTARSRRRYWTWEALSPTYNYPNCNSNTFSRFVSLAQGPLADRPSHFYGNREWSRGHALYVVFMPP

SEQ ID NO: 115070 - protein, 150 aa, Gossypium hirsutum
  Clone ID: uC-gsronu33B110c06b1.pep
TPRKKKPGKKRQGKKTKRPGREPREKRRQQGKRTPQKEGPKPPRERRQKQGRGQTTRREEDNGEGAQEERAKKGKSANAHKGKEGKKPKRVGPPREGQTRPGKTKAGKKKKRDPKNKPGPRQGGPTKAGHPKNGRPQKRRPLWGGKQKKT

SEQ ID NO: 115071 - protein, 34 aa, Gossypium hirsutum
  Clone ID: uC-gsronu33B110g01b1.pep
GLFFSFFFFFFFFFFFFFFFFSFFFFFYFFFYFK

SEQ ID NO: 115072 - protein, 122 aa, Gossypium hirsutum
  Clone ID: uC-gsronu33B110g12b1.pep
FFTKFYFLLLHSNILTLNFFLIYFNSLIGPSPLYVPSFLPPPSNVYLFFYGPLISFPCPSFSTLLPGKPSFSPNLFLFDHFPLSPSLFFSKRPVQSAFPKISSSLLPFVPPLLWSLYPPVFF

SEQ ID NO: 115073 - protein, 51 aa, Gossypium hirsutum
  Clone ID: uC-gsronu33B111a06b1.pep
FKKTVGTTNSEKTFFSSLNLHPVFFSKIIPHSNSSYSLIFHTQNFPSPSPT

SEQ ID NO: 115074 - protein, 104 aa, Gossypium hirsutum
  unsure (1)..(104): unsure at all Xaa locations
  Clone ID: uC-gsronu33B111a08b1.pep
MLDYLMAAHTDARTSEENSSDAPTDIPTFITDNMQDIMNSLSYMRTIMGIIGGVIGGTGWITGIMEFIVKALAMAVTIIGLIAXAQLSVHRYNDSLHRGILDGL

SEQ ID NO: 115075 - protein, 149 aa, Gossypium hirsutum
  Clone ID: uC-gsronu33B111b01b1.pep
SAVLFRKKKTGRALIERRVLTKREKYPPCSLNPRGACSPLFRALSALAPTLEFAGWVPNDNPLAGVVHLGVLLSLAAPLFICLVRLPALFAFRSGLIALFLPSRRSSDRLIVILDVGLALPLTSSILACFGSRSDRHERGHSCRLAAPL

SEQ ID NO: 115076 - protein, 37 aa, Gossypium hirsutum
  Clone ID: uC-gsronu33B111b07b1.pep
KGQKAQALGPRPLSSAPVALRVHTTRLVLNDTVRGVS

SEQ ID NO: 115077 - protein, 111 aa, Gossypium hirsutum
  unsure (1)..(111): unsure at all Xaa locations
  Clone ID: uC-gsronu33B111c01b1.pep
KHLEGGLKLCGGDIHKESTIHLALQLRGGMQIFVRTLTRKTITLDVXSYDTIDNRKAKAHDMECIPSDQRLLILPXKHLLDRRYLTNNNIDNEKTLYLVLHLYHHMHIHFK

SEQ ID NO: 115078 - protein, 67 aa, Gossypium hirsutum
  Clone ID: uC-gsronu33B111d01b1.pep
ERNSPFSDKSLQRLVFFKKNYAVFYNSLIQVSKPTGSALKSWSRRGLDSSSEHLEVLRIFDQYDLIT

SEQ ID NO: 115079 - protein, 121 aa, Gossypium hirsutum
  Clone ID: uC-gsronu33B111d12b1.pep
LTKAHNNGGIFKNIGRLTPNGIPFWAPTLRPPFGPPALRFPVLPPLASAAFFLVFGPSYPLFWPPLSSLLAALPLPFPFFAPSADILLCPFGFSRTGPLQFVLPTSVSARFSIGSPPLCSP

SEQ ID NO: 115080 - protein, 55 aa, Gossypium hirsutum
  Clone ID: uC-gsronu33B111f01b1.pep
DILDRAYCDSSEAMHVAFFSWIKYVGLTKFFFSGFSLRKIYHWYSWISCSVTVNC

SEQ ID NO: 115081 - protein, 84 aa, Gossypium hirsutum
  Clone ID: uC-gsronu33B113a10b1.pep
RQKNLIPLNDTPLFIVSLVLGFFGFFQSQRYVFAFFFSTIFSESYSIFFLICHDQFRVKIRTISTVLFFKPSSYRKSPFAEPGG

SEQ ID NO: 115082 - protein, 53 aa, Gossypium hirsutum
  Clone ID: uC-gsronu33B113e05b1.pep
SIYSAPLNSMPCPVFSPPPLPGKPPVHYPTLIARANTLPFPPAFKTLARPGPL

SEQ ID NO: 115083 - protein, 60 aa, Gossypium hirsutum
  Clone ID: uC-gsronu33B113g01b1.pep
SSLRTVHHNGGTGAILTGNNQVRDLKPIHHAITLDINLVSGPNGVARGDYLYDKQYVFTD

SEQ ID NO: 115084 - protein, 58 aa, Gossypium hirsutum
  Clone ID: uC-gsronu33B113g02b1.pep
GKLERTSCMIEIGWWQHSPWCLQVLIFKRHTHIQRAIYVCNPTGLCYLKGKLYFRALF

SEQ ID NO: 115085 - protein, 144 aa, Gossypium hirsutum
  Clone ID: uC-gsronu33B114a01b1.pep
KKKKKKKKGKLKKKKGEKKKKKRRQDNKNKGGSHMCYKGGPLFSAAGGGALWGAVISFPLGALFAPFCWGTPCLSAPVSSLGGPALLSRSGVPPYGRLGRPSQSVAQSVVAVGAPPCWPFRSARPVGFPAPWLLFFPWPCLPVF

SEQ ID NO: 115086 - protein, 107 aa, Gossypium hirsutum
  Clone ID: uC-gsronu33B114b03b1.pep
IASGRPIGSERGGCSNVLLPTPTIKKQGAEFPENTYKYIKNSQEDTMKDPRGKRRINGGVKNQSFILKQMRTVATTACPSMMYIMVVKPSEEKVQAIGLEDLSYHDS

SEQ ID NO: 115087 - protein, 110 aa, Gossypium hirsutum
  Clone ID: uC-gsronu33B114d11b1.pep
KDTWFTTPKKKNKSKQRASCLGGGPLGGGPAWGPQRSARGRPWPHPSYGGPNSSPRGPRDPALEGETPGVPHLIGRAGWPPVPRAGPPQRARPCGPFPPVVAPAGRGGPP

SEQ ID NO: 115088 - protein, 67 aa, Gossypium hirsutum
  unsure (1)..(67): unsure at all Xaa locations
  Clone ID: uC-gsronu33B114h10b1.pep
MVYKNKTIANYQIDHNPQPTQTTTPRPXPTPAPAPAKSNNKKATTNPDTPHITPTDNPKTATSQNVT

SEQ ID NO: 115089 - protein, 62 aa, Gossypium hirsutum
  Clone ID: uC-gsronu33B116a04b1.pep
AYVLSPSLFRTTATKSLVLRTFNFQMIFENQGFNQIDSYSRWCPIDLGLESWYLHPFLLCLD

SEQ ID NO: 115090 - protein, 79 aa, Gossypium hirsutum
  Clone ID: uC-gsronu33B116b12b1.pep
FKKTKKKKKKGGIILKNMCVKTTPAIGNSRVGPGGPIQAILVLRAREREPWAVDPRHLSLEDGGSPLKEGTGQREPRPN

SEQ ID NO: 115091 - protein, 80 aa, Gossypium hirsutum
  unsure (1)..(80): unsure at all Xaa locations
  Clone ID: uC-gsronu33B116g11b1.pep
NPLPRGSYAYVKKKTPPKSGPTKPPSHGPPPCVPPPCPRTPPPRGXPPRPHKIPPXPKSPGPRTSPPPPPGYPPPCPPTP

SEQ ID NO: 115092 - protein, 80 aa, Gossypium hirsutum
  Clone ID: uC-gsronu33B117h09b1.pep
ELLVENWHELYFGGGKGSRKLQSQIPSLKNTLQTPHKRSKGKVKKCCEMAALALQFIISAVLGDPTALIAGVIGTLMSRA

SEQ ID NO: 115093 - protein, 25 aa, Gossypium hirsutum
  Clone ID: uC-gsronu33B121a12b1.pep
PGRSHSVRFVMDLGIRDEAARFQFL

SEQ ID NO: 115094 - protein, 93 aa, Gossypium hirsutum
  Clone ID: uC-gsronu33B121b02b1.pep
YIFSLIDISKVEGFFIEMPGFLLRRRMVGVCRLCPFSRFVLFSPLLCGGGGGGRRAGFSFLWGGAVSSSCRSSLLPLLLFVRLVSALFCPRLV

SEQ ID NO: 115095 - protein, 57 aa, Gossypium hirsutum
  Clone ID: uC-gsronu33B121b06b1.pep
FPLLTLFVIHNQCCFEIPFPTPKGSFRKPYKVSRLFFLVLMLNLTIVYPLPFTYQFL

SEQ ID NO: 115096 - protein, 36 aa, Gossypium hirsutum
  Clone ID: uC-gsronu33B121e11b1.pep
RMLSAKRRVRNTVLFGPISLALKNPSLANLLLSGRS

SEQ ID NO: 115097 - protein, 36 aa, Gossypium hirsutum
  Clone ID: uC-gsronu33B121f04b1.pep
DTYLRGSIGQRYCNDSYLFKPISFRKLFCHSFLQDP

SEQ ID NO: 115098 - protein, 33 aa, Gossypium hirsutum
  Clone ID: uC-gsronu33B121f05b1.pep
RKAMKKTAKELDDLLEGWLKEHRQRRISGGIKA

SEQ ID NO: 115099 - protein, 47 aa, Gossypium hirsutum
  Clone ID: uC-gsronu33B121f09b1.pep
ALLSRPLGLILAMKVMDKALSARRKKLLRAQTEREILHTFNHSFLPS

SEQ ID NO: 115100 - protein, 40 aa, Gossypium hirsutum
  Clone ID: uC-gsronu33B121f12b1.pep
PRVRSFYPNVNVFLVKRGSEYSEVHMERVVKNLLMVETNE

SEQ ID NO: 115101 - protein, 49 aa, Gossypium hirsutum
  Clone ID: uC-gsronu33B121g09b1.pep
TNTNIQRGGPSIGSPYSYALVRSLTPFFRVTQFHFTARCFTLYMPGIPP

SEQ ID NO: 115102 - protein, 105 aa, Gossypium hirsutum
  Clone ID: uC-gsronu33B126a04b1.pep
MIRDLTCATQSLDKCTRATHLPSVSRLKGADLPCLCPYKNSSRLSSLGIDPKLAMDFASKVHSTNLHILIVSAKLHLSHITKPEGLQDILGITFHFPTLYTKYPL

SEQ ID NO: 115103 - protein, 52 aa, Gossypium hirsutum
  Clone ID: uC-gsronu33B126b07b1.pep
AKVKDTSLSWYHLLLFDCISRLLKPYSLPHLQLLRLSKPKKPPAAVNMNLHK

SEQ ID NO: 115104 - protein, 107 aa, Gossypium hirsutum
  Clone ID: uC-gsronu33B126e11b1.pep
GMRLFCRYRAGLIFHSGCVSDGKGDWPGSVSGISTCCNGVCQQQRLRRGLLGLFQSCYCTTQPIELGFRFPIAKSMTWRVCEVEPGTLKNPPLFFKFPLVFLCVFVC

SEQ ID NO: 115105 - protein, 115 aa, Gossypium hirsutum
  Clone ID: uC-gsronu33B126e12b1.pep
LYNTKKKKKIGGYFKKIWGFLKKNIITGAPSKGSILSSAGARSFIFSYILPHLPPTVPLYTTPLLVIPWRSPTKAAFAKPPSLHFAYFLKGPPLSPFPTIPQPQWAMAHPLYVGP

SEQ ID NO: 115106 - protein, 55 aa, Gossypium hirsutum
  Clone ID: uC-gsronu33B126h04b1.pep
NNMGLITLSQQTLFNLPILTLETMTYTCTKIISPIISHKGDYSNEEHTLALTSAL

SEQ ID NO: 115107 - protein, 51 aa, Gossypium hirsutum
  unsure (1)..(51): unsure at all Xaa locations
  Clone ID: uC-gsronu33B126h12b1.pep
MSLDRCGSGQILIRVCCLHIFFGLFSLSMMYITPMAIEKPXTPFSFMYIDT

SEQ ID NO: 115108 - protein, 148 aa, Gossypium hirsutum
  Clone ID: uC-gsronu33B127c10b1.pep
AKRRGKRTKDKGLRRWRKYKEPYGGNPQHPREKERDKGRGTIPTGGAQIGKRAESGALCEKPPPEKGGCSQTNKNGDTTGISHTTRCKTGPSKEKRGAPRRKQRSQAREQENGTPKEGPPRFFIFFFFFFFIFFFFKISPLFFFFFFF

SEQ ID NO: 115109 - protein, 62 aa, Gossypium hirsutum
  Clone ID: uC-gsronu33B127d02b1.pep
VSSIMCRTGFCKACLCVGVGFKRESRELSSFMDEERAHARRWRIGRRNWQGRLSLGFLYIGG

SEQ ID NO: 115110 - protein, 75 aa, Gossypium hirsutum
  Clone ID: uC-gsronu33B129b11b1.pep
LLTTVLPRDCRWEIMAYFRSLPQVSTSKDAEMWIPTDTKQWQQPPLITPIKSMNSEPLGLQLYLEHPSPSELVSG

SEQ ID NO: 115111 - protein, 72 aa, Gossypium hirsutum
  unsure (1)..(72): unsure at all Xaa locations
  Clone ID: uC-gsronu33B129d05b1.pep
FHRSTIKTVVGTDATLTLPLSDVMNTSNLQQVELAVHDNISRTAWWLTLPSMGDGHIHTXNFRNYAAPTKNL

SEQ ID NO: 115112 - protein, 58 aa, Gossypium hirsutum
  Clone ID: uC-gsronu33B129e06b1.pep
MCCLTLTDSCILALKEIKRLQKGTQNIGTIDNPSQIPATTGLSSSSLIKVFMAKLKNW

SEQ ID NO: 115113 - protein, 64 aa, Gossypium hirsutum
  Clone ID: uC-gsronu33B129e12b1.pep
ENLAVTQLNPLSLNSLFINGDHIEKASHLRSFHKLGMQKGQCNSPFSGSLNPAYRRGTLIVTDS

SEQ ID NO: 115114 - protein, 58 aa, Gossypium hirsutum
  Clone ID: uC-gsronu33B129f12b1.pep
RKGGCFERRFSWGRKGFFELGSCKKRASRLNLGERIKRLGFWIEGVSNVGSFKRGGRY

SEQ ID NO: 115115 - protein, 65 aa, Gossypium hirsutum
  Clone ID: uC-gsronu33B129g10b1.pep
GSSPFVPPPHCVLVLLLLGPLSPHLPNSLALAVFVLLPLSPVAIVRSNRSLGKFFKTAPGVCLWC

SEQ ID NO: 115116 - protein, 52 aa, Gossypium hirsutum
  Clone ID: uC-gsronu33B129h01b1.pep
TRGAYFLAFNVLYFGRFWHLCTSLSSLLFSSGGAFHVMFLMHNSTSKIYCLF

SEQ ID NO: 115117 - protein, 56 aa, Gossypium hirsutum
  Clone ID: uC-gsronu33B129h12b1.pep
SLVRPHLPNFWGALNTLVVGVKQTKHAAHMVEWDAQISTTFFACDLVTVFDATVTT

SEQ ID NO: 115118 - protein, 84 aa, Gossypium hirsutum
  unsure (1)..(84): unsure at all Xaa locations
  Clone ID: uC-gsronu33B130a05b1.pep
MGKRKTQRNNAAMLDSDDDNSSVSSSSTMRSAGMSVSGTEEVELNKDSLLDEAVDNLYEKRGSTREKALASIIEAFXSNLQHEF

SEQ ID NO: 115119 - protein, 65 aa, Gossypium hirsutum
  unsure (1)..(65): unsure at all Xaa locations
  Clone ID: uC-gsronu33B130a10b1.pep
VSLSXMSCDMLIWLYLGLTPPTHHLLFFFEKQNFTQKRRKIFSMLHPTDAMCHGEDPNTGYEMQH

SEQ ID NO: 115120 - protein, 73 aa, Gossypium hirsutum
  Clone ID: uC-gsronu33B130b11b1.pep
LTIAWICMLMIVHTKILLSEIPMVIHLLLSSLFLVKYLERLGISKVSRNVLQVHSFMTSWHREKKKNIKIHRF

SEQ ID NO: 115121 - protein, 97 aa, Gossypium hirsutum
  unsure (1)..(97): unsure at all Xaa locations
  Clone ID: uC-gsronu33B130c03b1.pep
SRVRPRVRNKELIATGGGVPLVLKLMFSPHVCTILIVRCSEIVEKLSSESNGVKFFVDEKGVQLELEPIIRELLALQXNSKSSNKFPEACFTCTVRK

SEQ ID NO: 115122 - protein, 49 aa, Gossypium hirsutum
  Clone ID: uC-gsronu33B130d07b1.pep
QDPKCSVHEYPPLRLFYQGLSNIKVSSHMHMVYVFVFPFRYCSKHREID

SEQ ID NO: 115123 - protein, 59 aa, Gossypium hirsutum
  Clone ID: uC-gsronu33B130e07b1.pep
SQEPFIHKSLKTCHEYQIPSFWCRCRGTRILGALNFYYFSHFILQFKFLFLFLIFNFLF

SEQ ID NO: 115124 - protein, 105 aa, Gossypium hirsutum
  unsure (1)..(105): unsure at all Xaa locations
  Clone ID: uC-gsronu33B130e08b1.pep
CPRVRTITPTVLLLTGVGFFSLILFGDPFAPTLAKFGMTTVVAAAYVGALQNIFSKSAKYSLFDPCKEMAYISLDEDTKVKGKAXIDDVCNPSEKSPCCWITMKK

SEQ ID NO: 115125 - protein, 166 aa, Gossypium hirsutum
  unsure (1)..(166): unsure at all Xaa locations
  Clone ID: uC-gsronu33B130e10b1.pep
GLSLYLIHIYITELKRTLQAFWVLGVVGSLATYLVLAQPAGENLVQYVIENPMAVWFVGPLFAALIGLVFKEGLCYGKLEAGILTFIIPTLLLGHLTGLMDDGTKLTLLGSWMALFVIFAGRKFTQPIKDDIGDXSVFVFNSLPKDKKEALIEKLEKQKLQSDSHF

SEQ ID NO: 115126 - protein, 55 aa, Gossypium hirsutum
  unsure (1)..(55): unsure at all Xaa locations
  Clone ID: uC-gsronu33B130f02b1.pep
TLFIERQVRLSTVYLDGHRSVLLXRYCDLIIADKLPATVPVVILCRQRLAFDIYV

SEQ ID NO: 115127 - protein, 135 aa, Gossypium hirsutum
  Clone ID: uC-gsronu33B130f05b1.pep
CGLKVLFSSDTLFEVHDSSINVVDIVKQHCSCAMWKPTGLPCHHAIAVFNCTGRSVYDYCSKYYTAESFRIAFAESINPASTIAHPCGNEEDSEEDEDQIMPPSISRPVAAQQPKKIRRNISQGNIGRSVCCTPC

SEQ ID NO: 115128 - protein, 56 aa, Gossypium hirsutum
  Clone ID: uC-gsronu33B130f06b1.pep
KAYQRWRSFIAESLLFLSFYTWEMNCMLIVVSCLEIWPCRLDTYNQLNLIVFQKSC

SEQ ID NO: 115129 - protein, 38 aa, Gossypium hirsutum
  Clone ID: uC-gsronu33B130g03b1.pep
CLGVVVKMYNSGIDIDDVLVMNKSSLICQMTCYFRNTN

SEQ ID NO: 115130 - protein, 125 aa, Gossypium hirsutum
  unsure (1)..(125): unsure at all Xaa locations
  Clone ID: uC-gsronu33B130g10b1.pep
MAQSSGSNTGKKLIRIDVSSDSVCPWCFVGKRNLDKAIAQAKDQFDFEIKWHPFFLDPSAPKEGVSKREYYEKKFGSRTQGILARMTEIFRNVGLEYDMSGLXGKSLDSPRLIYLAGKQGLDRQH

SEQ ID NO: 115131 - protein, 48 aa, Gossypium hirsutum
  Clone ID: uC-gsronu33B130h09b1.pep
KVILYIYLYSAHSGSIGVVAMVDPLYHRPHRLLLDNTGTKPRSSFTNE

SEQ ID NO: 115132 - protein, 54 aa, Gossypium hirsutum
  Clone ID: uC-gsronu33B130h11b1.pep
SKIALMNLYGNRHSRICQISEDKMMIESIYAIQTYHHQRMIISQLPSTSSPHRH

SEQ ID NO: 115133 - protein, 115 aa, Gossypium hirsutum
  Clone ID: uC-gsronu33B132b10b1.pep
LLEKLQDLLTSMCFTVYATQDDIAVWQKSSDIGCYEKLTGPDVYPATCDDSIEQDASWYTPLRPCVTSPRQKLMRSSVGSLPKWPQRLNIAPERISDVPGGSGNALKRDDSNWKE

SEQ ID NO: 115134 - protein, 124 aa, Gossypium hirsutum
  Clone ID: uC-gsronu33B132c08b1.pep
FPRVRKDDHHTKINLRVRMNEAVEAFINQRLISNQSTDFIDALEISNSNKELLMKLLQDPNSLLVKHVHELCDSQAKKQQTKTSSLSQPLNTIVVLKAVKQNCPNRISNWPSPKSHYSKKDRGV

SEQ ID NO: 115135 - protein, 138 aa, Gossypium hirsutum
  unsure (1)..(138): unsure at all Xaa locations
  Clone ID: uC-gsronu33B132d11b1.pep
STRPTNFSYKRLMINLHRPFIIHSPEMVSKIIKKRTPPRSIKRHRHHHRRKTSPVKKNGSFSVIASLNKSIKTCRRRIVRLFSRLAHIATPSTAAKRYRNGFQLLKQEENEEQEEFCGFESNFIDPRALVFERCLLHX

SEQ ID NO: 115136 - protein, 79 aa, Gossypium hirsutum
  unsure (1)..(79): unsure at all Xaa locations
  Clone ID: uC-gsronu33B132e05b1.pep
VTKKDLMQDISSEDVCVDMPGANARFDGSDIRSMLQRWFQETHVRFWDEKSTKDSXLTGAKXDRLPYQIWTVNFAYVSC

SEQ ID NO: 115137 - protein, 51 aa, Gossypium hirsutum
  Clone ID: uC-gsronu33B132e06b1.pep
TTKFPYILASFRKFLALKFVSVSPESANVCYFCFLRYDHRFFFVKKKKKNK

SEQ ID NO: 115138 - protein, 82 aa, Gossypium hirsutum
  Clone ID: uC-gsronu33B132e09b1.pep
KFVFLQLKSPKFPISNNTSQYTYTNHTSFSFSFHCTEFTHHSYSFSLDLLGFLLILGFQYSFLLNWKELKDKGNEEGSKAVR

SEQ ID NO: 115139 - protein, 72 aa, Gossypium hirsutum
  Clone ID: uC-gsronu33B134c04b1.pep
MGPRSLISTYTLTSGSPFFFAHPFGFLYYPIFYFFFFFFYFVFFFFFFFFFFSFFFFYFSPFFFSDAWADEW

SEQ ID NO: 115140 - protein, 90 aa, Gossypium hirsutum
  unsure (1)..(90): unsure at all Xaa locations
  Clone ID: uC-gsronu33B134c08b1.pep
MRTGKWQMACSATADRAATIRTRKLMTNPLLSRKHLXIDXLHPERPTAANAESYDKLCRMSEVKDPYSISVFKHRTHSGRGDSTALALTS

SEQ ID NO: 115141 - protein, 67 aa, Gossypium hirsutum
  Clone ID: uC-gsronu33B134e11b1.pep
EAVSSGAASANVVVPQSETRIRVVIVVPADRCPIVGCIGRHYRQLIHVHVMLEVVLGPKTKRVGRSG

SEQ ID NO: 115142 - protein, 103 aa, Gossypium hirsutum
  Clone ID: uC-gsronu33B136a08b1.pep
STSGDTQTQPGGTVLREQSQPTEEILHRTKRNKHKRGRIRAHTAINKTRSDSQQNQRDSPLESRKAKDRPSASCSTCLMKNAPQPPPLGNCTTRTPGLNKSYP

SEQ ID NO: 115143 - protein, 65 aa, Gossypium hirsutum
  Clone ID: uC-gsronu33B136e02b1.pep
YLYALIGIEKKKKKKKKKKKKKKKKKKKKKKKKKKKKKKKKKKKKKKKKKKKKKRGGAPFKKPNF

SEQ ID NO: 115144 - protein, 112 aa, Gossypium hirsutum
  Clone ID: uC-gsronu33B136g05b1.pep
RHFLRQKAMKRYRLCSLPPSFLKLPFFLGPPPLWFPRFPPRASDYMILLFVTPNFTSRAPLFPPFGLGTPWPPPLYSPWTPSPFPPFGFFHKAPPRSPSPPVPSPFWSMAPP

SEQ ID NO: 115145 - protein, 125 aa, Gossypium hirsutum
  Clone ID: uC-gsronu33B137f02b1.pep
KNQKKRGKSPRKRNGPPGKNPPPPPGKKPPPRGGPIPKKGGPMFKKRNGPGPKAKAPAGKKRKPPKPNKIGPPPGYPSPPRVNPGPGIENKAPQKKTKASPKKRKKTWNPKKGPPPPIKTAPTHF

SEQ ID NO: 115146 - protein, 133 aa, Gossypium hirsutum
  Clone ID: uC-gsronu33B137f09b1.pep
TTTTAGVKGPVKGGVQLPIRVGHWWERRTGGAPLVKRQLGKRGSFAKGIKWGNPGVSQARGWKKAGKEMKLGGPKKKLIRWKPGEGNLGPLKRPPPYYNFILIFINKVIIFFFFFFFFFFYFYFFFFFFFFFY

SEQ ID NO: 115147 - protein, 75 aa, Gossypium hirsutum
  Clone ID: uC-gsronu33B139d09b1.pep
FKKKKKKKKKKKKKKKKKKKKKKKKKKKKKKKKKKNKKKKKKKKKEKKGGPFWVLKPCLHRPEWPCSILWLRTSI

SEQ ID NO: 115148 - protein, 43 aa, Gossypium hirsutum
  Clone ID: uC-gsronu33B139d10b1.pep
FTRTLITGPNWFSMGTRVDVLTTILIWCCSTESRCYVHAFSTF

SEQ ID NO: 115149 - protein, 63 aa, Gossypium hirsutum
  Clone ID: uC-gsronu33B141a03b1.pep
SSVSGYRKDEYSWRYDDDTPEDVIRASTALENLQLDRKARNLSTSWRHASDGMSEDDGRADHM

SEQ ID NO: 115150 - protein, 131 aa, Gossypium hirsutum
  Clone ID: uC-gsronu33B141a12b1.pep
HASAPPYYYKSPPPPSPSPPPPYYYKSPPPPSPSPPPPYYYKSPPPPSPSPPPPYYYKSPPPPSPSPPPPYYYKSPPPPSPSPPPPYYYKSPVPPPSPSPPPPSPSPPPPSPSPPPPYYYKSPPPPPPYHY

SEQ ID NO: 115151 - protein, 183 aa, Gossypium hirsutum
  unsure (1)..(183): unsure at all Xaa locations
  Clone ID: uC-gsronu33B141b06b1.pep
MGSKKPFLVALLVHALSSGMILLSKAVFNMGMNISVFVFYRQVAGTIFMVPFAMVFEGKHAKPLSILTCLKIFMLASLGITLTLNIYGVALIYTSASLGAATINCIPVITFAFAVLLRMEKVRVKTVPGIAKVAGIXVCMAXVVTLAXYXGPAXKPPXHLHNFRPHSGAQDGDHDHASSAKNW

SEQ ID NO: 115152 - protein, 169 aa, Gossypium hirsutum
  Clone ID: uC-gsronu33B141b09b1.pep
GIGPGSFSSIPPAGGAEASAEFSMKILCPAGKIGGVIGKGGFNVKQLQQETGAGIHVEDAATESDERVICVSGIEALGNPRSHTIDAILQLQNKTSESSEKGTITTRLLVPSSKVGCILGQGGHVINEMRRRTQADIRVCSKDDKPKCAYEDEELVQISGILVSLGCFG

SEQ ID NO: 115153 - protein, 160 aa, Gossypium hirsutum
  Clone ID: uC-gsronu33B141c08b1.pep
PRVRPRVRPAQLHSNLKSIQLYRRQSKLVSEAAYYLTNLVSAKSFILDLNAKSLSIEESEFMESMEAARLVNRVPQETVTTIDNRSKFGKLMDPGPSTLLHVKTQTNINGGSNYPYMEAEAGELTVGDVERLLSLYKDVVTKYTSLCNTVRHFSVFRTQT

SEQ ID NO: 115154 - protein, 166 aa, Gossypium hirsutum
  unsure (1)..(166): unsure at all Xaa locations
  Clone ID: uC-gsronu33B141d12b1.pep
GVSIQDWWRNEQFWVIGGVSAHLFAVFQGLLKVLAGVDTNFTVTAKAAEDAEFGELYLFKWTTLLIPPTTLIILNMVGVVAGVSDAINNGYGSWGPLFGKLFFAFWVIVHLYPFLKGLMGRQNRTPTIVVLWSILLASIFSLVWVRIDPFLPKQXGPVLKXCGVEC

SEQ ID NO: 115155 - protein, 92 aa, Gossypium hirsutum
  Clone ID: uC-gsronu33B141e02b1.pep
RPSLQSNSKNYGPTTRIGPKSPNYQCSRTLAARNTVASSTTMNGASTSTPPAAFVRASYPHHVASVPESIGLSELHLPLQNQAQLIASHLLQ

SEQ ID NO: 115156 - protein, 172 aa, Gossypium hirsutum
  Clone ID: uC-gsronu33B141e05b1.pep
MLVMTVGGVTALATGVYTTREGARVTWGYINRILGQPSLIRESSIAKFPWSGMMSQARNRILNYSTAATVESKQSLQNVVLHPSLKRRIEHLARATANTKTHQAPFRNMLFYGPPGTGKTLVAREIAQKSGLDYAMMTGGDVAPLGAQAVTKIHEIFDWAKKSKKGLLLFID

SEQ ID NO: 115157 - protein, 124 aa, Gossypium hirsutum
  unsure (1)..(124): unsure at all Xaa locations
  Clone ID: uC-gsronu33B141f02b1.pep
GLSFSRISTSFTFSSSSSLASAPRFRFSTVNSEGKDCSLDSSTWGHXAVAASSFLASSSSWIASFSEHVSATSFALKESSEIFSEVSASLNLSSSIFLTELTFSSSSLETNGKLVVPSFGILVS

SEQ ID NO: 115158 - protein, 54 aa, Gossypium hirsutum
  Clone ID: uC-gsronu33B141f07b1.pep
FFFFFFFFFCFFFFFFFFFFFFFFFFFFFIFIYFVYVYLVFNSSWVLQSKTVGI

SEQ ID NO: 115159 - protein, 103 aa, Gossypium hirsutum
  Clone ID: uC-gsronu33B141f08b1.pep
GRVGGRVGGRVGDNPMNPCRAMSVQTNTSHTSSLIADDEELEFLMDSHSGRILAGHGGHVTDKTGNRDRPAADCGRGKPYKSCLPNPNPDGKRPENPGVYNRG

SEQ ID NO: 115160 - protein, 162 aa, Gossypium hirsutum
  unsure (1)..(162): unsure at all Xaa locations
  Clone ID: uC-gsronu33B141h05b1.pep
MPLMRARTSLQKLAYPERASVCFTAAXACTRLWESTPDDGCXWEEVAACWDAIRFFQLYVNNRRGGXAKLAQRAENNGYKAIVLTVDSPRLGIGEADVXNTLVVPSLKNLEGLLPTKFVSDEKGSGLAALASGTLDASFCWEDIAWLKSXTNLPILIKGCSL

SEQ ID NO: 115161 - protein, 50 aa, Gossypium hirsutum
  Clone ID: uC-gsronu33B141h09b1.pep
SRFIQKKKKTNKRFLCLYLILIRLLLLLLFFFSNNESCLRIGNRSSGRVG

SEQ ID NO: 115162 - protein, 100 aa, Gossypium hirsutum
  Clone ID: uC-gsronu33B141h12b1.pep
YKDLHSKELSSSSTPAFCCSPDRVALDIPLWNQNIHPLKRRIVGICRFGAHPLPPYPECDSFLVEVVLDTGPSSSHVVSKASPFVVASSGNSPNAWLTFS

SEQ ID NO: 115163 - protein, 134 aa, Gossypium hirsutum
  Clone ID: uC-gsronu33B143a05b1.pep
PATTPPKQRQRGGIITHYGGENPPPPRNNTRKTSTTTTATPDTPHYLRARLPRRISQTLKANKAAIKPTAIPSRTSPAPRDTAAADPRAHPHRTHYTSGMTGKTDSTRDTQITLDPAGYPRATTPHRSQLTQLT

SEQ ID NO: 115164 - protein, 94 aa, Gossypium hirsutum
  Clone ID: uC-gsronu33B143c02b1.pep
GITSRIHMPSQALSDLKEKKEDTMMKKKIALETPESERKTNKIKEPKGREEEDESAVKKSKKKREASELQTEEEERSQTSSELGEPEDPQEEKE

SEQ ID NO: 115165 - protein, 112 aa, Gossypium hirsutum
  Clone ID: uC-gsronu33B143d01b1.pep
HHIWVDKYFGRRRPEHNLINTGFYYIRSNNKTICLIHKWYTLKDSSTRKKEQDVLLDLLRHGVVTTLDLRVRIWETRQASGIREDSKDVAAETTVHAKCCHHIYAKVRDMSV

SEQ ID NO: 115166 - protein, 77 aa, Gossypium hirsutum
  Clone ID: uC-gsronu33B143f02b1.pep
PPPIRGLCDTVKLMKDGVQRLWGHWTLGHQGVLVTRLRMRKLSAKLMGKISCNTMDEELLRDIRASSGADDYGPCRA

SEQ ID NO: 115167 - protein, 73 aa, Gossypium hirsutum
  Clone ID: uC-gsronu33B143h02b1.pep
CSVGSECPAALQLCLFLVSTAGACPCQLFRFSAPRPLLLVVAPQAFFIMLPRFLVVFLGLVAGGVGRAGYSGA

SEQ ID NO: 115168 - protein, 63 aa, Gossypium hirsutum
  Clone ID: uC-gsronu33B143h03b1.pep
FALLSVIVWSSLLCSSSPFGHACFLSPSGEVSVCSVMQLSLSVVPLCTFAGFVFFLSLFFGWV

SEQ ID NO: 115169 - protein, 90 aa, Gossypium hirsutum
  Clone ID: uC-gsronu33B144e03b1.pep
SFTPPRARPRVGVVYRIFSLTPPEKQNDFRLQSRILTAAAATTAHAAGTLTSDIRRRQTALRPSSPELRQRQMTIEGPDMSTTETGHGCK

SEQ ID NO: 115170 - protein, 48 aa, Gossypium hirsutum
  Clone ID: uC-gsronu33B144f07b1.pep
TIRIRSTWIPKGVYSAREFQHAALDGGAHAIVSSHFLPIRTAVTGGVT

SEQ ID NO: 115171 - protein, 74 aa, Gossypium hirsutum
  Clone ID: uC-gsronu33B144g07b1.pep
FWSFPAGAPLGSSNFRPKILLSYWTLMLFAFLQSEKKNVMLCLRIIQIITCIHYHIYKQYNTPALNKSIQMEYY

SEQ ID NO: 115172 - protein, 51 aa, Gossypium hirsutum
  Clone ID: uC-gsronu33B144h01b1.pep
VVLVPPVSAFSLVYQHDQNRPLSFSFAGGSMYCSSRARVVHICFSESSLNP

SEQ ID NO: 115173 - protein, 125 aa, Gossypium hirsutum
  Clone ID: uC-gsronu33B145b09b1.pep
NKDEPLYTPFLYSHPKLPAYHPPPSNLIMVPYTKAKKKKKGGSLPIFTKKAYTRSGCRLQWHPQRTADRTMADLVAKNHPPSPSLSFFAIIIFLNITLYISSHNITNILKSILRIYISYTIQSIH

SEQ ID NO: 115174 - protein, 29 aa, Gossypium hirsutum
  unsure (1)..(29): unsure at all Xaa locations
  Clone ID: uC-gsronu33B145d09b1.pep
IFIYFYCVFFXXQTKAIDWSFHHCIKPQT

SEQ ID NO: 115175 - protein, 79 aa, Gossypium hirsutum
  unsure (1)..(79): unsure at all Xaa locations
  Clone ID: uC-gsronu33B146a08b1.pep
IAKYMEEGGFSLLLWVFTKISGPQLKNSAARCKLIKIKASHKLSXAGKKETAPATAPYIDKKAARPHQPLKTLGTQYRT

SEQ ID NO: 115176 - protein, 40 aa, Gossypium hirsutum
  Clone ID: uC-gsronu33B146a11b1.pep
IKTSMELMLSDQKNNIQVERLRSIPCFRFLLFPSPNDILF

SEQ ID NO: 115177 - protein, 66 aa, Gossypium hirsutum
  Clone ID: uC-gsronu33B146d11b1.pep
ASKVVDFQMKDTADAIIARVLLPQKFQGQFLSCIHVVRALISMIRPRPLFSPFVVKFAVLVWEKNN

SEQ ID NO: 115178 - protein, 79 aa, Gossypium hirsutum
  Clone ID: uC-gsronu33B146f02b1.pep
RALFLNKPLGERGWAPRGLNWGKARVSPAQGWENTGRKICLGGPKKKPIRPQHGEGNLGPPKGAPPGKKCMKQEAKAIS

SEQ ID NO: 115179 - protein, 109 aa, Gossypium hirsutum
  Clone ID: uC-gsronu33B146g01b1.pep
LPDLTLRVRFIPCQNARSVWTVAFQFPFGANLQDNVLAMALQYVRCVIPSVQRIAMAICPCGSSPTMGPKPSSGCNPALTLAHWICQSYRFHLGEEIAEMPITWWPLNI

SEQ ID NO: 115180 - protein, 131 aa, Gossypium hirsutum
  Clone ID: uC-gsronu33B147b08b1.pep
LLRKNKDKKKRGGLKKKFSQTTTKNQKAQEKDPNIPEEVLKPRPAPEMERPSTLYNADVRLYMHANTRNADDSEPSRPPLDTWARPTLEDGEHPWILQPVRGWRTAREQRKEPLPGPGGGQKPYGEPQTQL

SEQ ID NO: 115181 - protein, 95 aa, Gossypium hirsutum
  Clone ID: uC-gsronu33B148a04b1.pep
VALRGGRYMAILHYGGPVFFGCFLFFIIYGFHHAFRQLRGSQVQFDPHWQKCPFSVVFISGTNREFVLGCVFVLLWSECWLSCPNIQGSGSFTNR

SEQ ID NO: 115182 - protein, 68 aa, Gossypium hirsutum
  Clone ID: uC-gsronu33B148e07b1.pep
KTLTSKGSLFEKTVRKDKGAQKFNNRKGLTNESFLPHPQKTQPKNLLIPHFKKKKLTSPHLSNPPRSN

SEQ ID NO: 115183 - protein, 67 aa, Gossypium hirsutum
  Clone ID: uC-gsronu33B148e11b1.pep
MPSPFSYFTPRAYKQRRLKNKNGQIKKVSRHQDVQRWPVALIKVPPYKRHPPSFSCVLTSYLPNLFP

SEQ ID NO: 115184 - protein, 93 aa, Gossypium hirsutum
  Clone ID: uC-gsronu33B148g09b1.pep
GCIRCERLEELIVERTSERVGRRWLSPSTPVESNAIRPFMRKFHPLTPYQPPHFARFLAPIVLSLVCRRFNPINATHQTFPGPLALLCGLSCI

SEQ ID NO: 115185 - protein, 99 aa, Gossypium hirsutum
  Clone ID: uC-gsronu33B148h10b1.pep
SRISSQSLCSFGSHLGVHIKIAFWFIPCQRVGVHLAVYISVHSVCSNLGLHCFRYTTLNRYLFLALALVVVGTIFSAFLYKPFQVLPSDAWADAWANAW

SEQ ID NO: 115186 - protein, 59 aa, Gossypium hirsutum
  Clone ID: uC-gsronu33B148h11b1.pep
LYPLPQSANMMVCAICNIHTLAALLRYPRALIIVPCRCCTSRILCYQLRPLIVPSLLAK

SEQ ID NO: 115187 - protein, 148 aa, Gossypium hirsutum
  Clone ID: uC-gsronu33B150h04b1.pep
MEEQMVFAWVMIFCLAIAPVYGQHYSKTIKLGGRVEKKTRLRFFYHDFPGGKNPTTVLLAQANITQDFFSPSPYSSLYAMDDPLTIGPERTSTTIGNAQGLYIALSRDPNKFTAVLYADFAFTTGRFNGSSFSLFSRYPLTDFVPSPD

SEQ ID NO: 115188 - protein, 115 aa, Gossypium hirsutum
  Clone ID: uC-gsronu33B153g03b2.pep
VRKSRAWKLTAFQRLDFTCDDVLDCLKEDSIIGKGGAGIVYKGLMPNGDQVAVKRLPAMSRGSSHDHGFNAEIQTLGRIRHRHIVRLLGFCSNHETYLLLYEYMPNGSLGVVFHG

SEQ ID NO: 115189 - protein, 86 aa, Gossypium hirsutum
  Clone ID: uC-gsronu33B154a11b2.pep
ILFAMQLTIALTRALVLTMGIKLDLLQIMVKTMPKAFLCAKELAYELATNIPNTHVMLDRMLHLLATYLITNCSLSSFSDSIAERL

SEQ ID NO: 115190 - protein, 50 aa, Gossypium hirsutum
  Clone ID: uC-gsronu33B154b01b2.pep
SAEFSLIVCSLSQLILIHSLSKAPSTVPSSSNQINVIPPPCGYSFYESMV

SEQ ID NO: 115191 - protein, 58 aa, Gossypium hirsutum
  unsure (1)..(58): unsure at all Xaa locations
  Clone ID: uC-gsronu33B154c05b2.pep
DRKDELESLKHLLTFSSISXNVXNFLIQLNIVVNGYSLDRKVAPNKIVPDRLLLTRRI

SEQ ID NO: 115192 - protein, 73 aa, Gossypium hirsutum
  unsure (1)..(73): unsure at all Xaa locations
  Clone ID: uC-gsronu33B154d06b2.pep
LFSCYDLSSRTSVGDPTVAFEFXGGLSLIXPAKNYLIPAXPLRNVMLXAFAPTTSASCIMESEQQLGTRVSFA

SEQ ID NO: 115193 - protein, 73 aa, Gossypium hirsutum
  Clone ID: uC-gsronu33B154e02b2.pep
GGRSIFKEGHFGNPTPPFVAQTPFEPLKRGPAIAIAAYERECLVFSDKSAVGRNEPPQLCRIDHYRTRGRKRW

SEQ ID NO: 115194 - protein, 151 aa, Gossypium hirsutum
  Clone ID: uC-gsronu33B154h11b2.pep
KKKKKKKKKRGKFLKKKGRKNPKKKKGAAPFGVPCFRPLACTRLASCLVPLNFIFLAAVFQPPVWKTLGLPHFIPLAFLPLFPCWPFSFLALPVRPSQPFPILIGFWAPPFLGPLTPPFVVVPPMVPVSFASPLPPALFVFFPPFFSLFPV

SEQ ID NO: 115195 - protein, 78 aa, Gossypium hirsutum
  Clone ID: uC-gsronu33B156c07b1.pep
WVSASHAQPPLIHMLSCHLTHSSIIHACHGHLWKPIHQRPVQGLVFNSILARITLNQVNTFMRVANYTFMQLSTSRLS

SEQ ID NO: 115196 - protein, 40 aa, Gossypium hirsutum
  Clone ID: uC-gsronu33B156e11b1.pep
MLYMYCIKQTKSFSKHINHIIYAVRITLKTSKYGKKVYMY

SEQ ID NO: 115197 - protein, 65 aa, Gossypium hirsutum
  Clone ID: uC-gsronu33B156f06b1.pep
KPKKVIELDTSKVYEIKNINLLLQREKSYKYVNNGKELYMTEDPYVHSYGKYLQNGRKGDVVPEE

SEQ ID NO: 115198 - protein, 58 aa, Gossypium hirsutum
  Clone ID: uC-gsronu33B156f08b1.pep
KKLSSKKKSNSLYNKITKVKVDTEKHISLISMAIKLQTKTFRKVNLLYRLATAVGLRF

SEQ ID NO: 115199 - protein, 64 aa, Gossypium hirsutum
  Clone ID: uC-gsronu33B157e05b1.pep
MDRPRFVIDSAEVEQMAKQSRQTVLHLLPSLVKSAQALARPPISNYHVGAVGVGSSGRIFFGVN

SEQ ID NO: 115200 - protein, 47 aa, Gossypium hirsutum
  Clone ID: uC-gsronu33B157e08b1.pep
VNRKVEFFDVDNKEYGNIGYELIIRRGLSFFKTYSMERKKKKNRKPK

SEQ ID NO: 115201 - protein, 62 aa, Gossypium hirsutum
  unsure (1)..(62): unsure at all Xaa locations
  Clone ID: uC-gsronu33B157g03b1.pep
SVVLWFVRTAKSLVHVKRLPWKFLGNRALLVEGMAVEVXWDARNCLFGSSVGNAAGMFKALP

SEQ ID NO: 115202 - protein, 44 aa, Gossypium hirsutum
  Clone ID: uC-gsronu33B157g06b1.pep
TYHVFKPCLGIHYSLRSWKLTPTFFLISVTYGSCYQTCLSEIDG

SEQ ID NO: 115203 - protein, 70 aa, Gossypium hirsutum
  Clone ID: uC-gsronu33B157g09b1.pep
AWKPCSTGIKTRKVHQSQQDETAPSREKKRVKQTHLMQISRLQAFPKSEFIHTAHFFFFYRPTVFKVWHV

SEQ ID NO: 115204 - protein, 50 aa, Gossypium hirsutum
  Clone ID: uC-gsronu33B159h12b1.pep
SEFWEVIECSRKLPPRVLHGTPPSSSQVSLFSRASEPPKEIPLQLRFSSD

SEQ ID NO: 115205 - protein, 130 aa, Gossypium hirsutum
  unsure (1)..(130): unsure at all Xaa locations
  Clone ID: uC-gsronu33B160a07b1.pep
KKNWGKKTPTKKKGNTRNQTRAGHFRGPKARPPSTRPWPPXTAPPRGKPGPYPTNAASGKPPAGPQPKNRKGPPLSPVPTVAQPAGPTAPPPERPPKRGRGRAPHRGTAPVAGAGPPPRPKPPPLPRPPP

SEQ ID NO: 115206 - protein, 49 aa, Gossypium hirsutum
  Clone ID: uC-gsronu33B160e03b1.pep
QRRDGKNPGVPQLNRLEEKPLLASWDISKKARPDRLSKKLPTLNGKGNP

SEQ ID NO: 115207 - protein, 107 aa, Gossypium hirsutum
  Clone ID: uC-gsronu33B160e07b1.pep
RCYPCGIFSDSSCFLFRGSDDSIGLAFSVRVGTGVLHLPCFFPFVPPVISGLVMFILVVLRYLLHYVRLQPSSPPVNVFRSDRPAGGFGPNILLNRPPRPILCMFIN

SEQ ID NO: 115208 - protein, 120 aa, Gossypium hirsutum
  Clone ID: uC-gsronu33B162c07b2.pep
SAADAGQAEALKAHEAEFISMLITATAVKGSAMDNNMLTDNGSTTPVVIGPVSAVNALFLLDQPPCRSRRGHQRFSGIAATFTMLEERFPRRKLLPNNFYKTLQLFNRFWDWPLTIHTSY

SEQ ID NO: 115209 - protein, 100 aa, Gossypium hirsutum
  Clone ID: uC-gsronu33B162d04b2.pep
VWFFLGVYVFGGGGFFGGPGFPSPVLRVFFFFLGALIFISLAGFFPLGAWETLGFPPFIFFAAVPFLAGWVFREGARPVGLSHLLAPFIGNGPPPFGGPF

SEQ ID NO: 115210 - protein, 70 aa, Gossypium hirsutum
  Clone ID: uC-gsronu33B164a12b2.pep
HASFHASNPFQVFQGANINHTGERQFQRPMLLHEHWTERDNQGFSTPCLTLTLLSVPTYQARPFTESPFV

SEQ ID NO: 115211 - protein, 51 aa, Gossypium hirsutum
  Clone ID: uC-gsronu33B164b08b2.pep
HDIMYNGHSAKSATSDIAGSPQWGSRTILAGQNHFGDLVVLDRPYDLGHHR

SEQ ID NO: 115212 - protein, 121 aa, Gossypium hirsutum
  unsure (1)..(121): unsure at all Xaa locations
  Clone ID: uC-gsronu33B164f05b2.pep
VNHLSMKFGIAGLCSSTLFDIIMAVLVEDQGIMIALRKKRKLLKKETLHCIXYVHCSLNFKGVLACQXHTVAHNLWSKGRKGMALLIHNRAAHDVDGDVHPGAKIASGIXFDHATGVIVGE

SEQ ID NO: 115213 - protein, 55 aa, Gossypium hirsutum
  Clone ID: uC-gsronu33B167f09b1.pep
KVATPGNRNLILLNSHPLFFFFFFFFFFFFFFFFFFFFFFFFFFFFFFFFFFFFF

SEQ ID NO: 115214 - protein, 128 aa, Gossypium hirsutum
  Clone ID: uC-gsronu33B168a10b1.pep
NKRAGGGVLANIKGTNLGKRKTGGAYWAFKGGAKGDFWPGQFLGGPTGFSHSQCVKQGEREFFFTAPQIRNCKGLPREGNGEPPKRDPILVVTRQKIYGGSQGFGFLETPFLFTISPLFFFFFFFFFI

SEQ ID NO: 115215 - protein, 60 aa, Gossypium hirsutum
  unsure (1)..(60): unsure at all Xaa locations
  Clone ID: uC-gsronu33B170a06b1.pep
LGPQIICPPYGLEQKSVAFLENGPGLGHYFFXPGPGRTDILHGFILLILKYFFTYLYNLC

SEQ ID NO: 115216 - protein, 140 aa, Gossypium hirsutum
  unsure (1)..(140): unsure at all Xaa locations
  Clone ID: uC-gsronu33B170h06b1.pep
ITSSKYTAQEWDFEWRGLGYXSETKDIMLLLLTVPGLDGLRKGLIDDTRNLLKHLMLVDALCLFLHMDIYWKYEMRSNWDAETCTHNEYLRNQKYIMKSQRNALIIAAALILDWLLYSDTNLDAKIEQWNQXAERLKNRN

SEQ ID NO: 115217 - protein, 50 aa, Gossypium hirsutum
  unsure (1)..(50): unsure at all Xaa locations
  Clone ID: uC-gsronu33B171c02b1.pep
IINSITLIENEYKKKIYLKYINILHIVDASMAVSYEPSLQLKKNKAXRDE

SEQ ID NO: 115218 - protein, 117 aa, Gossypium hirsutum
  unsure (1)..(117): unsure at all Xaa locations
  Clone ID: uC-gsronu33B172c06b1.pep
PKPPFPNPXAXGQRRDLXSHTPQSPPPHTXXDQTPKSTEKAKNPPEEGGDRERKNPRKAHQGPDRRATRKPKKATDPPXEAXATXTTDEXGPYETFIFYTVLTSIISLDRGSLTQKG

SEQ ID NO: 115219 - protein, 53 aa, Gossypium hirsutum
  Clone ID: uC-gsronu33B172c08b1.pep
SNAGQPLITCNMDSGTTIMAAANIANTMSSEMLPTGFVVTQSGIIRPRARKPW

SEQ ID NO: 115220 - protein, 42 aa, Gossypium hirsutum
  Clone ID: uC-gsronu33B172h10b1.pep
LYIVMLFAVIELVQMVSFRFILRRYFSFRHVFVPPFILSFSS

SEQ ID NO: 115221 - protein, 49 aa, Gossypium hirsutum
  Clone ID: uC-gsronu33B178d11b1.pep
STICEGEAIVGSMTVAPNEKNPRDVDIMVKYSLSGRRCAVSRVQFYKMR

SEQ ID NO: 115222 - protein, 84 aa, Gossypium hirsutum
  Clone ID: uC-gsronu33B178e09b1.pep
GRDFALLLHLGKRRKKKGLFLFVLLLKAQSLTILHREGWRKNEGKRKTKEGKKKLIPFKTLSVKCKNLKKENPKPKKDEHRLLK

SEQ ID NO: 115223 - protein, 107 aa, Gossypium hirsutum
  unsure (1)..(107): unsure at all Xaa locations
  Clone ID: uC-gsronu33B178f07b1.pep
YKLVTAGTSPAIALSLHHFETTCPVVDSIASXAVLRATINDKTVPAPLLPMHFHDCFIRPCDASVLLYSTGTNXADQDLPAHLSLHGPPVIETAKTEVEAASPGVAS

SEQ ID NO: 115224 - protein, 60 aa, Gossypium hirsutum
  Clone ID: uC-gsronu33B179f08b1.pep
IKQILQSKAAKINIAQVLLLHHQTPIFYTNSIRNPKKGEKKYNHSYNSHLSQNSIFQSFN

SEQ ID NO: 115225 - protein, 61 aa, Gossypium hirsutum
  Clone ID: uC-gsronu33B179h01b1.pep
YIRSEACYFFRFRFFIIYGFNRAFQQLHESQKQFDPHMQPCHDSVVLIYGPSKVIFAGAIP

SEQ ID NO: 115226 - protein, 49 aa, Gossypium hirsutum
  Clone ID: uC-gsronu33B179h03b1.pep
IISSINNQAFKRRATGPYSQPWHLQHAKSSLLPGLTSLSRISLGLYMLR

SEQ ID NO: 115227 - protein, 133 aa, Gossypium hirsutum
  Clone ID: uC-gsronu33b023b01b1.pep
HASDLEENVGEGQLYDLFGQVGTVLSVRVCRDQNKRSSLGYAYVNYSNYQDAAHAKEMFNFTPINGKPMRIMFSQRDPIIRRTGYANVFIKNLDPAIDNKALYDIFAAFGNVLSCKVATDRNGQAKGFGLCSV

SEQ ID NO: 115228 - protein, 85 aa, Gossypium hirsutum
  unsure (1)..(85): unsure at all Xaa locations
  Clone ID: uC-gsronu33b023b05b1.pep
FNFNSNMGLMGASWSEKCLPSEKREKRSLCLKKCVEKGWMYRTFQRDSAFSTLSKRNLFQTYMPWFLTXTGYKYLNXLIFVDTFS

SEQ ID NO: 115229 - protein, 57 aa, Gossypium hirsutum
  Clone ID: uC-gsronu33b023d01b1.pep
NSYCRNKLIHVLGNVLTWWWCWARSAYFPPLHASNCYPHPSIPKKRTRGRTRGRTRK

SEQ ID NO: 115230 - protein, 31 aa, Gossypium hirsutum
  Clone ID: uC-gsronu33b023d11b1.pep
SFTCLFKLINYLNWFCNIFKRLVNLVSLYVL

SEQ ID NO: 115231 - protein, 79 aa, Gossypium hirsutum
  Clone ID: uC-gsronu33b023e02b1.pep
FTASVAQRALRYIAVKLKRLFDSLTHSKLYVCMVTGLEPDSVDDAFRYAREILKWDYNDNSFISTEFSTTTHIEASTTS

SEQ ID NO: 115232 - protein, 41 aa, Gossypium hirsutum
  Clone ID: uC-gsronu33b023e07b1.pep
FFLDRDGRPFGGFLTRNGVTYTYLTTTYTKLNGGIGRFVLL

SEQ ID NO: 115233 - protein, 71 aa, Gossypium hirsutum
  Clone ID: uC-gsronu33b023e11b1.pep
LIFILCYIISLIYICMRRSIVDRLKNKKCGNEKIHMFYYSFTSLGYSITVRSVIMRRCISSIGSDKKILDF

SEQ ID NO: 115234 - protein, 49 aa, Gossypium hirsutum
  Clone ID: uC-gsronu33b023f03b1.pep
PAKKKKNNLLVVRNFPIIFKFNTQHVVAIGKTFLQSLFEPSLLYLLTDE

SEQ ID NO: 115235 - protein, 99 aa, Gossypium hirsutum
  unsure (1)..(99): unsure at all Xaa locations
  Clone ID: uC-gsronu33b023h07b1.pep
HPQLLYQSEVYMLLQGGTEIPHLKWFAVEGEYNVMVIDLLGPSLEDLFNYCNRKXLSLKTVLMLADQLLIRVXYMPSRGFIHRDIKPHNFLMGLGRKAN

SEQ ID NO: 115236 - protein, 90 aa, Gossypium hirsutum
  Clone ID: uC-gsronu33b023h08b1.pep
SMSKKKETWKPKTKSFKARVHRIKLDIGKIKEDQRCIRDEQRDIRERFEDVNRQCDALRLETEAIVKQSALNRIRLGIMLNILKARQVGD

SEQ ID NO: 115237 - protein, 49 aa, Gossypium hirsutum
  Clone ID: uC-gsronu33b023h10b1.pep
KIISHMIMPKYVLDMRILSEMKSKYLHLNLFAGYFIGVTPIRSQKPTRQ

SEQ ID NO: 115238 - protein, 104 aa, Gossypium hirsutum
  Clone ID: uC-gsronu33b025b02b1.pep
DGSSSLDVDEDLEFLEGDIHRSVVNGIPSIDFSERIQNILVKEMELTVILKLLGRNIGYEALNNRISSLWNTAKPFHLMDIENGYFLAKFQSLDDPTKVLAQGP

SEQ ID NO: 115239 - protein, 78 aa, Gossypium hirsutum
  Clone ID: uC-gsronu33b025b03b1.pep
YHRTQVYDLLNSESAIHNITCFSPFCSSKILGLNSITFISSSSFLFCIKCNLIFMKNLDYPYELFTISFRRKLDISSL

SEQ ID NO: 115240 - protein, 75 aa, Gossypium hirsutum
  Clone ID: uC-gsronu33b025c12b1.pep
WLKKSGEEAPALGGFENGEKRLGGLRSKPSLSFRLLLGMESGTRRGGRRIVLVFIVAPYLEHATSPPNNLLQIYK

SEQ ID NO: 115241 - protein, 72 aa, Gossypium hirsutum
  Clone ID: uC-gsronu33b025d04b1.pep
GNVFFLFLYLPSLLYDLELQWLNYLYVCLLPSFMNPFSKHGTNCWTNLYLAINSSLYILNKRKQTTRSIKKS

SEQ ID NO: 115242 - protein, 173 aa, Gossypium hirsutum
  unsure (1)..(173): unsure at all Xaa locations
  Clone ID: uC-gsronu33b025e04b1.pep
MERNGMRRQLAIMRQSLFDQGHVDEQFVQLEELQDDANPNFVEEVVTLYYRDSARIILNIEQALERKPFDFRKLDAYMHQFKGSSSSIGAKKVKAESTLFREYCKAGNGEXCMRSFQHLKXEYATLRKKVGAYFQVARQAGPVETASRPIRKAGDIYPSKFSNLHLFGRNYTT

SEQ ID NO: 115243 - protein, 97 aa, Gossypium hirsutum
  Clone ID: uC-gsronu33b025e06b1.pep
HLVRPRVLPRGRLRVREGVSSERKEITMNEEVPDEMMTLEDFLAKAGAVEEAAAVASAEVKLHPDRLSGGVYTFDPVGGGAFQILDKMEGSIVGLGN

SEQ ID NO: 115244 - protein, 125 aa, Gossypium hirsutum
  Clone ID: uC-gsronu33b025e08b1.pep
FHASAVIQSLGEEEINGGFLVQLDKLIRLLETPIFAYLRLQLLEPGRYVWLLKALYGLLMLLPQQSAAFKILQTRLKTVPSYSFNGDQLKHALSGNPYFHHGAPQIFEDGNKNLNNGNVQNDFNF

SEQ ID NO: 115245 - protein, 151 aa, Gossypium hirsutum
  unsure (1)..(151): unsure at all Xaa locations
  Clone ID: uC-gsronu33b025e10b1.pep
SFLQEVRRGVXRADIYSSALSPNFQWLAVSSDKGTVHIFHLRVRVFGGHSSSQSSSVQGPALLHQNSSTSLDALIPPSTGANPSSSLSFMRGVLPKYFSSEWSFARFHLPEDTQFIAAFGSQNTVVVVGMNGSFYRCSFDPRYGGRNVAAG

SEQ ID NO: 115246 - protein, 124 aa, Gossypium hirsutum
  unsure (1)..(124): unsure at all Xaa locations
  Clone ID: uC-gsronu33b025e11b1.pep
RTALLQSLGGRKGINRFGDFSAPLDEALIHVSLDLSGRPHLSYDLNIPTARVGTYDTQLVEHFFQSLVNTSGMTLHIRQLAGKNSHHIIEATFKAFARALRQATEYDPRRLGTIPSXKGVLSRS

SEQ ID NO: 115247 - protein, 100 aa, Gossypium hirsutum
  Clone ID: uC-gsronu33b025h05b1.pep
YSVTNDAGGGCHLTMGAGLSRVLRGGPSCSANLPIPSQINYPVPGGFTISGLNLNLGGGSTQPVMRPMQPSQPPPMLQHQDVTPSLMNTATFGAEGGYGA

SEQ ID NO: 115248 - protein, 145 aa, Gossypium hirsutum
  unsure (1)..(145): unsure at all Xaa locations
  Clone ID: uC-gsronu33b025h12b1.pep
YWTPERNRIGAAFKDGRGIEWNALTSQKTHAIKLPCAWVMTCAFSPTGQSAACGGLDSMCSIFNLNSPTDRDGNLPVSKTLSGHKGYVSCCQYVPDEDIHIITRSGDQTCVLWDITTGLRTSVFXGEFYSGHTDVVLSASINGSN

SEQ ID NO: 115249 - protein, 61 aa, Gossypium hirsutum
  Clone ID: uC-gsronu33b112a01b1.pep
TGVSKGSSTTCSSTSSTGVSSKGGGTPLFYSLNSMSNGKNTKKALELVVGLLFALFIKKNG

SEQ ID NO: 115250 - protein, 150 aa, Gossypium hirsutum
  unsure (1)..(150): unsure at all Xaa locations
  Clone ID: uC-gsronu33b112b02b1.pep
PRVRDLSHFQSSAMAKLRSRSFWSHLSDAFLFFAAAFLALVLVWSFWSYFTPTPNFLPTFTHPSSNSKTNLVESGFGVNLKSDPKDPTFYDDPEMSYSIEKPVKDWDGKRQXWLKHHXXFAAGARERIVLVPGVPPKPCKNXVGDHLLLR

SEQ ID NO: 115251 - protein, 80 aa, Gossypium hirsutum
  Clone ID: uC-gsronu33b112c01b1.pep
STRPALRVIWEMCGHRNGYRGVGKALQSSTGKRAFGMEYESDWTKNRVSSAFTAQVIRSATSLMPWSCKIPIGDGFHEFL

SEQ ID NO: 115252 - protein, 59 aa, Gossypium hirsutum
  Clone ID: uC-gsronu33b112c08b1.pep
KRFFSHKKYVCNTYVRYQSAYKQIKRVWKLKGVRGSFDFIYIFLLCILFFFLFSYLFKK

SEQ ID NO: 115253 - protein, 61 aa, Gossypium hirsutum
  Clone ID: uC-gsronu33b112f07b1.pep
FKISSPCGSPQVFIFVAAEYETRKNSLNQDSLWDAIIPAKERAKFWIRSLNIFRFVDHGKN

SEQ ID NO: 115254 - protein, 77 aa, Gossypium hirsutum
  Clone ID: uC-gsronu33b112g05b1.pep
AQCHRRLYDHMQTTIAASRSKDHTTKSPTSPFIRGISTVRSYTKDSHHSGTLSLQSESGSNELIDSSSVGIRVQPTH

SEQ ID NO: 115255 - protein, 139 aa, Gossypium hirsutum
  Clone ID: uC-gsronu33b112h05b1.pep
CLLMVLFRREFSFCDSLYLWEMMWALEYDPDLFSLYEEPGSNITKAVGSNKGKPKSRRPCGKYERENMKIKSSDASLPISVFLVASVLKDKSSKLLHEARGLDDVVKILNDMTGNLDAKKACIGAMKLHKKYLKKAKRT

SEQ ID NO: 115256 - protein, 35 aa, Gossypium hirsutum
  Clone ID: uC-gsflmaxxa008c12b1.pep
CWVKGNWWHFFLSSPKGSDSKIYGVFNSICKHNDR

SEQ ID NO: 115257 - protein, 85 aa, Gossypium hirsutum
  Clone ID: uC-gsflmaxxa009g12b1.pep
RAGPGAVSGASHTRAFTRILGSLPYCTEQGIRREVLKSSLLTAVHISNAMNALAASRLGATTPGLATRIYGELTQTTYSSGFLIT

SEQ ID NO: 115258 - protein, 138 aa, Gossypium hirsutum
  unsure (1)..(138): unsure at all Xaa locations
  Clone ID: uC-gsflmaxxa010c12b1.pep
MTTATIHYGQARKPTGDLLRAKDEEQPEISEEYSVSAVPFFVFFKDGKVVDKLEGADPSSLANKVAKVTGSINPRDTAAPXASLGMAAGPTVLERCHIFGKGNRFFPNGKSSANLSFITKIKKPLQKWNDSHPRMLFM

SEQ ID NO: 115259 - protein, 85 aa, Gossypium hirsutum
  Clone ID: uC-gsflmaxxa029a03b1.pep
AQAWFLLLPMNMNLRSRLNKMKKGRKKADSLEIGASIPILAAVKVKSHESRMVTLEELYKLTIETWTKRKGMELKSTEIIANTPL

SEQ ID NO: 115260 - protein, 99 aa, Gossypium hirsutum
  Clone ID: uC-gsflmaxxa029a08b1.pep
RVVPYPGFLFLFCACISPFFLGPFSNFQGQFLACSSPDTFLSLFLFTHFLSLALIRGPKLCSAVEGASSFWNMLESWAPVSFSLPPLLPVSPRSSVKLI

SEQ ID NO: 115261 - protein, 55 aa, Gossypium hirsutum
  Clone ID: uC-gsflmaxxa029b02b1.pep
TGFSEQAKCALDDNHHFTTVATCSLQSFPIKRKEMLQISAKYTHPSGYLFGEGIK

SEQ ID NO: 115262 - protein, 50 aa, Gossypium hirsutum
  Clone ID: uC-gsflmaxxa029c04b1.pep
MGRTRGMGAGRKLRTHRRRQRWADKAYKKSNPWKMKGRSPLPGFFPCLKE

SEQ ID NO: 115263 - protein, 154 aa, Gossypium hirsutum
  unsure (1)..(154): unsure at all Xaa locations
  Clone ID: uC-gsflmaxxa029d03b1.pep
MEKRRGKEEKKPTIVVVQGPKPEKPTDCSRMRQILVKLKHNTPFHLKHMSVTNSSILFLHKNLMQELKSLGQFLVINEIFEKITTXTRSTGFXFLNKSFTGYYNKYKEYRDTTFNGAVELNYXDMASXHRVRFPWIQIIXTGTIPNKLLRRESN

SEQ ID NO: 115264 - protein, 83 aa, Gossypium hirsutum
  unsure (1)..(83): unsure at all Xaa locations
  Clone ID: uC-gsflmaxxa029d04b1.pep
FPNKKKPKLRVKDNKERMALKLNHFPQKLLCFGLPAMATFSSSKFFMAFTLLFXSKEGENLKKTYMPRRHMHVQFTHSMPPPK

SEQ ID NO: 115265 - protein, 71 aa, Gossypium hirsutum
  Clone ID: uC-gsflmaxxa029e11b1.pep
DHVFRSSTSKLQIRGQENKYRRERTKFCTLKFNLCNSQKRKKKNGWEINYRRWQRTFPGDMNRKSRKYGHT

SEQ ID NO: 115266 - protein, 73 aa, Gossypium hirsutum
  Clone ID: uC-gsflmaxxa029f05b1.pep
IGCEFSGELGLTMFIKSQVGLLHKIHACAHITVKLEVIRCHKHCKFLTSACEDLCFTRSLFLMAPSKLVVVGE

SEQ ID NO: 115267 - protein, 50 aa, Gossypium hirsutum
  Clone ID: uC-gsflmaxxa029g02b1.pep
ITFVFLNNARLKSSIVSGTKGSASIVKMKIGNMHYSLLKQPWRSSALPKF

SEQ ID NO: 115268 - protein, 33 aa, Gossypium hirsutum
  Clone ID: uC-gsflmaxxa029g08b1.pep
LTLTMSLPFSNCGWVLLKTRRGSYATPLNLNTN

SEQ ID NO: 115269 - protein, 91 aa, Gossypium hirsutum
  unsure (1)..(91): unsure at all Xaa locations
  Clone ID: uC-gsflmaxxa043h04b1.pep
MLMPEKNREEIXKYLFQRGRXYAKIDYSLAKHPELDVPNLXALKLMHSFKTKEYVRETTAWMHYNWDLTNDGIELLRTDLNLPSEICTAPL

SEQ ID NO: 115270 - protein, 69 aa, Gossypium hirsutum
  unsure (1)..(69): unsure at all Xaa locations
  Clone ID: uC-gsflmaxxa045b07b1.pep
MGLLGDDGRGXDLPGHARSMXVWREWLGESTYACNAHFLTTSXGWESFMRADDSKYRAEIHLQLRCHAL

SEQ ID NO: 115271 - protein, 53 aa, Gossypium hirsutum
  Clone ID: uC-gsflmaxxa045g01b1.pep
YVLRRYPQRLQRNEPACPVSLKHATSQTRQCTSRNRRRRSRQFRRGGTSRRTS

SEQ ID NO: 115272 - protein, 119 aa, Gossypium hirsutum
  unsure (1)..(119): unsure at all Xaa locations
  Clone ID: uC-gsflmaxxa045h07b1.pep
MEAHRAAPAPHKSTIDRLKTTLKETFFPDDAVHQSKGQPTGKKWILAAQYIFPILQWGPHYRPGLFKYDIAAGLTIASLAIPQGISYAKLDNLPTLVGLYSSXVPRLVIAXLASSRDLA

SEQ ID NO: 115273 - protein, 105 aa, Gossypium hirsutum
  Clone ID: uC-gsflmaxxa046b01b1.pep
ILSRSPVLSNTFGRQQGVAISYIDFILFNYFFIIFLFFFFFFFLDHEQNLSNKKCKEEQIIETHEKILRVYTNLCHPEIPEMHSTAMEPIYPLHIRKPGPNLIIN

SEQ ID NO: 115274 - protein, 112 aa, Gossypium hirsutum
  unsure (1)..(112): unsure at all Xaa locations
  Clone ID: uC-gsflmaxxa046h12b1.pep
MCPGGYTDGTTSLSGKAPRKDLRDYAGYWGALVHIEIIRRGAYACTVCVTLKDAYAMETGGXLTVATSADHCVCMSTWSTYGGDLYLSDRCTWKTDEDTNSSRTKMHPYVYS

SEQ ID NO: 115275 - protein, 44 aa, Gossypium hirsutum
  Clone ID: uC-gsflmaxxa047d09b1.pep
RVECIIGGIGVLVCKGHNYNGSCSNLTQEAKGKNPKKDLKKPPK

SEQ ID NO: 115276 - protein, 79 aa, Gossypium hirsutum
  unsure (1)..(79): unsure at all Xaa locations
  Clone ID: uC-gsflmaxxa049b10b1.pep
MVLQLTDRQFSDLNDALILFDMDXYGCITTXKELGSVMRSLGQNPTEAELLVLINEVFADGNGTIVIPXFFNLMVRKMI

SEQ ID NO: 115277 - protein, 90 aa, Gossypium hirsutum
  Clone ID: uC-gsflmaxxa049g04b1.pep
RNKPSVSTAGSPPSGRHLLIVGEDRVRSRPWDSSLSSLALKGWLLGTAPACTSSAVLAVGSEGSHLSLPLRNIDRFGIPKWNLIFWQSAK

SEQ ID NO: 115278 - protein, 41 aa, Gossypium hirsutum
  Clone ID: uC-gsflmaxxa054c04b1.pep
YFYVHTPIHLYAGSRHLTEEAISVHPLRNHLSMASTIAKHC

SEQ ID NO: 115279 - protein, 111 aa, Gossypium hirsutum
  unsure (1)..(111): unsure at all Xaa locations
  Clone ID: uC-gsflmaxxa055f12b1.pep
LRLTSGVCTKILLDLLAGILAWAYHAMQPPIPKTCGYTDGSPVTESRIKLKDGRHLTYKEHGVLRDAXHLKLCMSNGMDSCRHDAVVGQSLSPAIXQPFEVYIVAFDTPGF

SEQ ID NO: 115280 - protein, 65 aa, Gossypium hirsutum
  Clone ID: uC-gsflmaxxa058a06b1.pep
HVLNPFLQQLQLLTDRDMTIERCSNLDSLHQYTDRKRSLTVSTKNIFLSLYIMHISERWHTIIKI

SEQ ID NO: 115281 - protein, 38 aa, Gossypium hirsutum
  Clone ID: uC-gsflmaxxa067g05b1.pep
CFVKKSAIVKINESVSLYHIMVNQFTVLHHRADYRITH

SEQ ID NO: 115282 - protein, 90 aa, Gossypium hirsutum
  Clone ID: uC-gsflmaxxa067h02b1.pep
GRSHSHLLRNNHGNQECTSATAIANMPLESAPLYLVCSWLQTRSNNYWGPPKSASYQLAFSQNKPFQMSPVSCPLSIEPEKVGGLRRSQQ

SEQ ID NO: 115283 - protein, 62 aa, Gossypium hirsutum
  Clone ID: uC-gsflmaxxa067h05b1.pep
PIGQCPSFSLMRKKAPYLDSRNSELPLIIFFRGHSMLPLKESSMCPSKTKSNPFSCLYQECH

SEQ ID NO: 115284 - protein, 44 aa, Gossypium hirsutum
  Clone ID: uC-gsflmaxxa069a05b1.pep
ELLVDECSFFFKFLARKEEKKKMRPILMTWLQSAFPFSCHPLFF

SEQ ID NO: 115285 - protein, 44 aa, Gossypium hirsutum
  Clone ID: uC-gsflmaxxa069d07b1.pep
IEAVLREAVKQSARRHHESMGEYGQTPQDSTATPSIWKASSSPK

SEQ ID NO: 115286 - protein, 46 aa, Gossypium hirsutum
  Clone ID: uC-gsflmaxxa069d08b1.pep
LFVRFYLLILWGVVFIGERRKEEKSKTKISWLGNPSSAATGNAMGH

SEQ ID NO: 115287 - protein, 49 aa, Gossypium hirsutum
  Clone ID: uC-gsflmaxxa069e02b1.pep
VDNKSVDKVEIWSSMFFKLSPQSESLSESLSVFTNFLSEKLSAEESDRW

SEQ ID NO: 115288 - protein, 124 aa, Gossypium hirsutum
  unsure (1)..(124): unsure at all Xaa locations
  Clone ID: uC-gsflmaxxa069f10b1.pep
SKRKKRRKKEEEREKKIKXEYRRKKVKVRRSERRDKKKXKGKRKKKGREKKRKXEEKKGNSDGKKEQNDKNKRKKCXRRLSRCKMKEKKKRKEGEGKRNGTRSSVVVGPPSPNSETVMLLEALV

SEQ ID NO: 115289 - protein, 54 aa, Gossypium hirsutum
  Clone ID: uC-gsflmaxxa069g07b1.pep
QRKTTYTSGLLRLLYGLVTANLLRSCLLTPLSRARRNVSPACLSARHDLNSTRC

SEQ ID NO: 115290 - protein, 53 aa, Gossypium hirsutum
  Clone ID: uC-gsflmaxxa069g09b1.pep
LHHLKHKEGEILNIMRRTLQPYYCLRKMGFFDGLLRGPLRRPCYLSPTSNGLR

SEQ ID NO: 115291 - protein, 49 aa, Gossypium hirsutum
  Clone ID: uC-gsflmaxxa070a05b1.pep
HFSRSKPNKNMARRVNIVPSMFVLLLSLMLTSKVETGPYVSSSQARPRS

SEQ ID NO: 115292 - protein, 66 aa, Gossypium hirsutum
  Clone ID: uC-gsflmaxxa070g07b1.pep
AKAMKKGLQASQIHRSKSQYNQLTYSKTFSVDSLWLSLSLLSISPLERSFKEKYKEYLKEKKMKQK

SEQ ID NO: 115293 - protein, 38 aa, Gossypium hirsutum
  Clone ID: uC-gsflmaxxa070h08b1.pep
PLRILTWSWWWGIIMFIFQAEQRSEHQQTLSSSNGGIN

SEQ ID NO: 115294 - protein, 69 aa, Gossypium hirsutum
  Clone ID: uC-gsflmaxxa088f03b1.pep
SNSTPIFFFLCKVEEKDHLSYFSQAAKNQIITIFIPLSASSSKCRITPDGCDPAVMSGVPAGGAAALII

SEQ ID NO: 115295 - protein, 57 aa, Gossypium hirsutum
  Clone ID: uC-gsflmaxxa088g09b1.pep
FLRKECSEMGEEVKVFGYWASPYSYRAELALKLKGSFDKFLILDITSLLASFNSDTQ

SEQ ID NO: 115296 - protein, 92 aa, Gossypium hirsutum
  Clone ID: uC-gsflmaxxa089d07b1.pep
STPTVTHTALRGVFRTNWWSLRILSYPLLPLYRVLKGKRSRVHFITPPEIMDSDTQFCTCLSAYTSMASGDWITGDTWIRFHETHIIHFDGP

SEQ ID NO: 115297 - protein, 81 aa, Gossypium hirsutum
  Clone ID: uC-gsflmaxxa089e05b1.pep
MAGCATVIGALLGLGTQLFLNCLRTAPYMRHPREHLSRICTRTPFVNQLVNWDAQLPRDLDNMLEKAKVANERRFSDGDDD

SEQ ID NO: 115298 - protein, 117 aa, Gossypium hirsutum
  Clone ID: uC-gsflmaxxa089f07b1.pep
LTRTVTHTALRGAFRINWGSLLFLTYPLLPLYKVSKGKLSRRHFSSPTGMMVSHTQVCADLAEYRTRPLGSRIPEEPGKRVHEIILAASMIREVLFELKVHPELHINSLTSMMSDAL

SEQ ID NO: 115299 - protein, 116 aa, Gossypium hirsutum
  unsure (1)..(116): unsure at all Xaa locations
  Clone ID: uC-gsflmaxxa089f09b1.pep
MQISSGAGMGLLESLLRAERRKSFTRTDSDAGXAGKALDELMGSLYNELRTSERAMRQQXLFCGPNAAXTVNFFLASGTILTNQLLIGRVCFNFPLLLTLLHYAVSWLLLAISRTL

SEQ ID NO: 115300 - protein, 94 aa, Gossypium hirsutum
  unsure (1)..(94): unsure at all Xaa locations
  Clone ID: uC-gsflmaxxa089g07b1.pep
MAPIAEKMPAXRSLGSEKKAVSQIAPADKKPKAGIKLPKEGGSAVGDTNMXIVKKSVLTYNIYIFKVLMQVHPDIRISSKGMGIMNSYINDIFL

SEQ ID NO: 115301 - protein, 45 aa, Gossypium hirsutum
  Clone ID: uC-gsflmaxxa089g11b1.pep
NLTIITIEGGVFKNLPGLTHLSATVAVDGTCVHCQCHWLQLLNRT

SEQ ID NO: 115302 - protein, 49 aa, Gossypium hirsutum
  Clone ID: uC-gsflmaxxa090b03b1.pep
FHIPSVLALVEFLGLVETLKLVYNRPPSGTSRFCGKKTPAWCGPGNSAP

SEQ ID NO: 115303 - protein, 91 aa, Gossypium hirsutum
  Clone ID: uC-gsflmaxxa090b09b1.pep
SLYVDKLRSLAITGSKLSRVTDSHCQVHDVIIVWPHTSLVPAPAYRHHCRLSHPVCTGISRSSGACGKLKHCIKAPPFGAFKLRVKKPPAG

SEQ ID NO: 115304 - protein, 60 aa, Gossypium hirsutum
  unsure (1)..(60): unsure at all Xaa locations
  Clone ID: uC-gsflmaxxa090e04b1.pep
METFLFTLXSVTEGHPVMLCDQVSDAALDAXCLAQDPDWMDSCETCTATNMVMVFGENYH

SEQ ID NO: 115305 - protein, 138 aa, Gossypium hirsutum
  Clone ID: uC-gsflmaxxa090f04b1.pep
AHFFAKKKRNQTGVFYKYIVCYHLRSVVEAISADDDNAASLYPVFCPEEVMTFPSTCGACAATSETWMYVTRIPYFQEVIVMASTCNACGYRNSEMKPGGAIPDKGKRITLSVRNLTDLTRDVIKSDTASVKSPELDL

SEQ ID NO: 115306 - protein, 46 aa, Gossypium hirsutum
  Clone ID: uC-gsflmaxxa090f06b1.pep
PKSPGHPRRNYRTAPTRTNVGPLKNVGRLKQQDRGQGQQTTPGAGN

SEQ ID NO: 115307 - protein, 116 aa, Gossypium hirsutum
  unsure (1)..(116): unsure at all Xaa locations
  Clone ID: uC-gsflmaxxa090f10b1.pep
IAGTYLTNGSELLLEILGPGIARGLVLPILGAHPDAMLILVSGLSGTVETAQEQVIVRMAXIAGSTVMLLTVIWGYCVEEDRCDHHDSLAVDGTITNGLHLTETGVRPDIWTSLCC

SEQ ID NO: 115308 - protein, 58 aa, Gossypium hirsutum
  Clone ID: uC-gsflmaxxa090h09b1.pep
AWGRCLPVRVLELQPRSVIILKLMKLDNIVLAGCLPRAYSVPFIIALVVQQEDQPLVV

SEQ ID NO: 115309 - protein, 66 aa, Gossypium hirsutum
  Clone ID: uC-gsflmaxxa090h12b1.pep
FYTPPTPLSKQGKAWAKDLISIFHHKNEALRSFLYTKTTAVYLLYPSRETLDIIEMSLSPKGSETF

SEQ ID NO: 115310 - protein, 59 aa, Gossypium hirsutum
  Clone ID: uC-gsflmaxxa091c04b1.pep
NTDLTSTLHSRGHLKPPSRGAPKYKPTPTPGEDPNEGGYHFRGTPLSLYQPSDGLHNSR

SEQ ID NO: 115311 - protein, 97 aa, Gossypium hirsutum
  unsure (1)..(97): unsure at all Xaa locations
  Clone ID: uC-gsflmaxxa091c10b1.pep
MHARHQLLEEPIRTAINLEPLKAXYFPATTNKVXTLGPRFRTVEDINGCLTAGMTEARKDXSRGMTPEYYEETFXNLKACLKRTKKLCAVMLDTCGP

SEQ ID NO: 115312 - protein, 28 aa, Gossypium hirsutum
  Clone ID: uC-gsflmaxxa091d06b1.pep
GRKAVSKQKLPAPSQAPTFMTSHPDDLS

SEQ ID NO: 115313 - protein, 83 aa, Gossypium hirsutum
  Clone ID: uC-gsflmaxxa091d11b1.pep
NSCPCGSGLVKSTTVLLSSQGRKRKGETREIISGHIGQAGIKAANSCCELDCLEHDSHPEGTTASNTRVAVTHDAINTFLSET

SEQ ID NO: 115314 - protein, 123 aa, Gossypium hirsutum
  unsure (1)..(123): unsure at all Xaa locations
  Clone ID: uC-gsflmaxxa091e12b1.pep
PRIRGATHAPGFFGPTNADWPRGSITPTRAGSTAWTEALAAGADDSRSGPXGVAFYSANLVAXTRLAERHRKGVDEQYVWEYQTGAMATRTGDTCGENIARGTKITLXSKDAQLEDLEERRLK

SEQ ID NO: 115315 - protein, 104 aa, Gossypium hirsutum
  unsure (1)..(104): unsure at all Xaa locations
  Clone ID: uC-gsflmaxxa091f11b1.pep
NILQTSTSTEKMSILKTMLLVPPPAIMPDANIXLINTARVQAQXHHLLTMSQCPYEQLAQSSCDTKHASTQAGGLRPFRATFHFAGWDKXYGSQLYMSEPSGNY

SEQ ID NO: 115316 - protein, 101 aa, Gossypium hirsutum
  Clone ID: uC-gsflmaxxa092e09b1.pep
PCPLPLRPLRGFISPNIHLLVAPALFLQRAVFASRPSLIISRTTPLAGAVTIIWCCLTPHRTFGWSTHGYLLSLPVLRLLSSVPEHYAREPRKWAPQAVAV

SEQ ID NO: 115317 - protein, 41 aa, Gossypium hirsutum
  Clone ID: uC-gsflmaxxa093b07b1.pep
NYSQTEQTHESIRYSFSSLPKEIALEIASSLEVPTLFSLRC

SEQ ID NO: 115318 - protein, 154 aa, Gossypium hirsutum
  Clone ID: uC-gsflmaxxa093c10b1.pep
TGLAHGLVDPKRLCKPVQQRVQCELTKGIVLKYLNRDAEVDGHVRESSDDGGGLGKSDLFCCNGLPTLETVLSEEGPSNLLITLRSVVVLWHDVHSYYPMCPYLFLTIFISFSTAFSCFFLFSFSHFISLVFPLFSLATFLFFLFFFLFHFFFS

SEQ ID NO: 115319 - protein, 76 aa, Gossypium hirsutum
  unsure (1)..(76): unsure at all Xaa locations
  Clone ID: uC-gsflmaxxa093f04b1.pep
TARRTFGFVRTHVVSPKGKHQVSMDWFYGLXGDNGSSSFGCCERVHXPSIKWICPTAPTCAGAVLVGISYTEWPDV

SEQ ID NO: 115320 - protein, 126 aa, Gossypium hirsutum
  Clone ID: uC-gsflmaxxa093h03b1.pep
LFHKVIPWRIHQPSCNALHFSASCLHSSQILVFFLEEQSPFAFLCSQMQCRFHLSRYEPASALGPYSASIRCSQSFLLVAAVVATVTVLIAPSSFVSFSFCRKQWARVVGPGGSAPAPAGVPAYPI

SEQ ID NO: 115321 - protein, 48 aa, Gossypium hirsutum
  unsure (1)..(48): unsure at all Xaa locations
  Clone ID: uC-gsflmaxxa094e08b1.pep
RGLPTIGRLGGPGGCFLVLAIDFRSGRGCNKELTLSAPXRRAKAKVNY

SEQ ID NO: 115322 - protein, 57 aa, Gossypium hirsutum
  Clone ID: uC-gsflmaxxa094e10b1.pep
LTRPGLLKTAGELLENNGRFQPHTASADQAILLTNLTEEHSSTSRKSTPVQPGHTGS

SEQ ID NO: 115323 - protein, 40 aa, Gossypium hirsutum
  unsure (1)..(40): unsure at all Xaa locations
  Clone ID: uC-gsflmaxxa094f06b1.pep
GLPEPQFSSXDLXKLYSAIYNMCTQKPPHDYSQQWFDMGH

SEQ ID NO: 115324 - protein, 87 aa, Gossypium hirsutum
  Clone ID: uC-gsflmaxxa094h05b1.pep
PYPQSQSMTPPIFTKHHTLLHPPFSSGSASSDYFAYPPNYPTHSQKSEADPSTVYANTSPLLSTTTLPDPDIAPQPSFNSTTHGATL

SEQ ID NO: 115325 - protein, 71 aa, Gossypium hirsutum
  Clone ID: uC-gsflmaxxa094h11b1.pep
HASGLLCFESGSFSNFFCFNSPDEGCFMPCIALSGVRLLCAPHGGVGGEPAALEECPGVGALHSASWGTGS

SEQ ID NO: 115326 - protein, 52 aa, Gossypium hirsutum
  Clone ID: uC-gsflmaxxa095a04b1.pep
SVFGGWHVYHLHSVRWRRLCVSQGLIPGTSLCKIGLSVCSVVARLRACKNQL

SEQ ID NO: 115327 - protein, 93 aa, Gossypium hirsutum
  Clone ID: uC-gsflmaxxa095f05b1.pep
KHMGAKTSRMFRSSFTSPLTRNMSHSTEKPCFSPENHNGFHLVEPISSSPPPKSRPFPPAHKPQDAINAPKESIPTLNPTASLPFLHSPPLQL

SEQ ID NO: 115328 - protein, 39 aa, Gossypium hirsutum
  Clone ID: uC-gsflmaxxa095f08b1.pep
LDAWAVSETEKKGALFKTLSGNQATPKEEPLEPMPETGT

SEQ ID NO: 115329 - protein, 80 aa, Gossypium hirsutum
  Clone ID: uC-gsflmaxxa095g01b1.pep
QLNHFLFSSIYKLRELGYSPAETAPASFHHEKECPKDASGNHFSTRHHRLFRSLTSSYPGVRLSFHSPTFISLLSFHFLC

SEQ ID NO: 115330 - protein, 36 aa, Gossypium hirsutum
  Clone ID: uC-gsflmaxxa095g09b1.pep
HIDGRRSKLGFHDLTVNQYGDRQPMVRGPESPPCLT

SEQ ID NO: 115331 - protein, 44 aa, Gossypium hirsutum
  unsure (1)..(44): unsure at all Xaa locations
  Clone ID: uC-gsflmaxxa095h03b1.pep
QKMVLFFDENEQXVNFINSIGGFITIHREAKSIREKPQAFEFFN

SEQ ID NO: 115332 - protein, 55 aa, Gossypium hirsutum
  Clone ID: uC-gsflmaxxa095h10b1.pep
DRGSIPYRTLKTINPIHPLPINSYLSYPFNPVTYIIYQHSCITIPQKQTHNSHSL

SEQ ID NO: 115333 - protein, 122 aa, Gossypium hirsutum
  Clone ID: uC-gsflmaxxa096a11b1.pep
SGLGHDGLGQRTTPAGPSVTDRGHRPRRAKKDGDIGRSQMGWGIATALIVNNIFVVLKEGDSEYLLNGIKTAEANVRGLANRGQITKDKAEKALSMLKGALDYSEFKDVDMVIQAAIENVAK

SEQ ID NO: 115334 - protein, 57 aa, Gossypium hirsutum
  Clone ID: uC-gsflmaxxa097c07b1.pep
SCVDHETGEGGPNKKGLVANGQKEFTMGDTLTQLDKDMAAPYNQRLGQPIKGTYLIG

SEQ ID NO: 115335 - protein, 98 aa, Gossypium hirsutum
  Clone ID: uC-gsflmaxxa097c10b1.pep
QHLLEVPLLCGQLQAFFRCSRVPITSLISEAFQLRYLSDTAKHVNQLASGGFIPSIDVTYDLYVNVSLFLIHYDPLQIKAPISNIPPPKTQKNPRVKQ

SEQ ID NO: 115336 - protein, 78 aa, Gossypium hirsutum
  Clone ID: uC-gsflmaxxa097c12b1.pep
GKNYWYFGGGFLTNAGVHNNLHEQNLPEHRTDHNVTVTTHHLPAVLDISTVELAKVLSLHTPIKSLKHFMQNPEHLIK

SEQ ID NO: 115337 - protein, 100 aa, Gossypium hirsutum
  unsure (1)..(100): unsure at all Xaa locations
  Clone ID: uC-gsflmaxxa097d09b1.pep
SLGGACSSSALSAAGLGTGAPVISPQSQSFSXGGGSRWPSSLACSVPWTSGCSPWRPDVVISSTGRGGHSVLWIFKGRRGRSGLHLSCRCSSGRWTLPPV

SEQ ID NO: 115338 - protein, 58 aa, Gossypium hirsutum
  Clone ID: uC-gsflmaxxa097h02b1.pep
GVHSTGSALVHQWKQQRLSLCAEWSGCYANNITLEEECADALRVTISPPHFMRHGTGN

SEQ ID NO: 115339 - protein, 146 aa, Gossypium hirsutum
  Clone ID: uC-gsflmaxxa098d12b1.pep
MFYHIWVSPSSSTSIVLAMVLALTLTFVHSLTLRSDTEALQALTRSIDPNMIPPSSYISSWDFSADPCDSTGAKFLGILCSNPGDNSTNRIISIELDSAGYDGFLTHNIGNLTELTSLDLSKNQFRGPLPDTLKNFKTLIQISLSG

SEQ ID NO: 115340 - protein, 86 aa, Gossypium hirsutum
  Clone ID: uC-gsflmaxxa106d05b1.pep
WDGGAMRRVNRFPTPGRTLTCGGAAEKPLAQAAVMSTCPSSSLKSHNFPQKPAERIGLSRPSLVRRGAGTTLDPGAASTTGTRSPC

SEQ ID NO: 115341 - protein, 94 aa, Gossypium hirsutum
  Clone ID: uC-gsflmaxxa106d10b1.pep
QSFSNLMAFVGLFEVFLPLAFFLLLYCLRDKYHGPPKSFPLVGMMPQSSLLHSLGCHDCLTNTLPICHSTLLPTRVLLTQPSLLPSIPSIIYHI

SEQ ID NO: 115342 - protein, 117 aa, Gossypium hirsutum
  Clone ID: uC-gsflmaxxa106e04b1.pep
PFTCPKNKAPHLRRGPFKLVLPLSPPSASKGQSDAPDAAAKSGAKANGKTDLSQPLLDARKEACASGTPSTGGNPKGTYLLPKANLEGPSQAPTEIKAQGTIPAPADPRAFQRPQTG

SEQ ID NO: 115343 - protein, 80 aa, Gossypium hirsutum
  unsure (1)..(80): unsure at all Xaa locations
  Clone ID: uC-gsflmaxxa106g04b1.pep
RLLVAIGFIEGTNGVIXGAFSGSSMNPAGSFGPVLVSWTWDIHWIYWVGPLNGGGLVGLIYEFICNSNTHEQFPTTHYLA

SEQ ID NO: 115344 - protein, 36 aa, Gossypium hirsutum
  Clone ID: uC-gsflmaxxa119b01b1.pep
EILIQNLSTNHASRKVFADDEKFITTPFISAFGLGA

SEQ ID NO: 115345 - protein, 36 aa, Gossypium hirsutum
  Clone ID: uC-gsflmaxxa119c03b1.pep
PVLSPWYLSLGIPSRLTTQQPEIHVRKSYRANKAIP

SEQ ID NO: 115346 - protein, 39 aa, Gossypium hirsutum
  Clone ID: uC-gsflmaxxa119f02b1.pep
SASLFLSTCPFPCYHFKPPFNCLVFSHFSSKVLFFFSIC

SEQ ID NO: 115347 - protein, 41 aa, Gossypium hirsutum
  unsure (1)..(41): unsure at all Xaa locations
  Clone ID: uC-gsflmaxxa119f04b1.pep
ALKEKIPIEYPFFMPFVFLRGYMFKIKHNLVLILRGXDPGG

SEQ ID NO: 115348 - protein, 81 aa, Gossypium hirsutum
  Clone ID: uC-gsflnu33B003f03b1.pep
HAFEDSCIIRGIFSTFASKLQVDLLNVLDGNYFKFENQLKSNGKLSLTRKRWFRNDTLRLRLYGAQPILDQIACGGSSCIL

SEQ ID NO: 115349 - protein, 126 aa, Gossypium hirsutum
  unsure (1)..(126): unsure at all Xaa locations
  Clone ID: uC-gsflnu33B005a12b1.pep
EKQRKGKKRTAKKPTRPKKEQYTGGRPKSRRKTKAAKDKATKQXRSKAQRKKGPPEEKHERERGRTRQKRKGKKGKKASKKKKGRNTRAITSSRRIRNKRHQPKERPRQEKENGRSRPPQEKPGNR

SEQ ID NO: 115350 - protein, 70 aa, Gossypium hirsutum
  Clone ID: uC-gsflnu33B006a06b1.pep
HSYSSPLQGIRMTSSQLVRSNNQNDPLGLQPGPAILKTSAKPLQSLATFDAAAEDITSLRAANAVGGTVA

SEQ ID NO: 115351 - protein, 73 aa, Gossypium hirsutum
  Clone ID: uC-gsflnu33B006g06b1.pep
LYHYKNYQRASRIKCISYDLHQLHRPQFVHLDNSQCQMCVKNRLLNQIVLQHIFFIIFEIIIIKINIFLVFPH

SEQ ID NO: 115352 - protein, 51 aa, Gossypium hirsutum
  Clone ID: uC-gsflnu33B008h02b1.pep
WRNNSYCSIKVTFNLFMTAPTMLTVLSGLKSLSATITELMMLSEEPFLEPL

SEQ ID NO: 115353 - protein, 55 aa, Gossypium hirsutum
  Clone ID: uC-gsflnu33B012d10b1.pep
SDLNSNAFLYDGLRLRGGQTPDELEMEDGDESNPMRNQTGWPSGEERTAWPRRQH

SEQ ID NO: 115354 - protein, 41 aa, Gossypium hirsutum
  Clone ID: uC-gsflnu33B012g01b1.pep
FCSQNSRRNNGGHFLVDWRCYPQQQWLSRSLGFYAENDTTG

SEQ ID NO: 115355 - protein, 96 aa, Gossypium hirsutum
  unsure (1)..(96): unsure at all Xaa locations
  Clone ID: uC-gsflnu33B012g10b1.pep
QNDCWXLHCLEHGNQTEGHMTSDKTVGGGDDAFNTFFSETXGAGKHVPRADLAELEPTGIDESRTGTYRQFFHPEANXINCKVDSANNIXRGHYTI

SEQ ID NO: 115356 - protein, 67 aa, Gossypium hirsutum
  Clone ID: uC-gsflnu33B015d12b1.pep
FAPSNAHKAAGGTFKKGCGYHPPTRAATGGCGGRSWRGRQREAGGPTKTRKTIGRRTKNTRRPNQNA

SEQ ID NO: 115357 - protein, 104 aa, Gossypium hirsutum
  Clone ID: uC-gsflnu33B015g09b1.pep
KKTWLQKKKKNIIIIPFHFQKPKLLWASFLKIPNYHPLPCHIITFFSGPQRNIPCPHFYHREPGKPLRYPTLIPFRKLPFSQPGYFHNRPHREHLPTSCSTLTR

SEQ ID NO: 115358 - protein, 97 aa, Gossypium hirsutum
  Clone ID: uC-gsflnu33B015h06b1.pep
KTNTVGNPGIIKATPRQAHRLNACNSGTTAKREKMDKPKKTRGQQASPSRQAGEGQTAHTRQKTGRSNASAKDRTIKEKHTQPTVSGPFIMYLHPLV

SEQ ID NO: 115359 - protein, 62 aa, Gossypium hirsutum
  Clone ID: uC-gsflnu33B016a03b1.pep
RLRGPRRDIRGEPHARFYVSDKLHKCPGNVIDLKDAHYESTERGAAMVMANHYYSNILPNTV

SEQ ID NO: 115360 - protein, 56 aa, Gossypium hirsutum
  Clone ID: uC-gsflnu33B016a04b1.pep
LKFVIVQYIAFKQSKGFHPVSVIQHQLRSVFDTGISCMLLTVVSQTICMQIVNITQ

SEQ ID NO: 115361 - protein, 141 aa, Gossypium hirsutum
  Clone ID: uC-gsflnu33B016a07b1.pep
WGAVAPVRAPPRNSGRRHTRAFSGDRFNACIGALDAGEPDVLRDWAACEGIQLEDLLPLSKDTRARSADIARKVDVRREAQPRGYEIAKAGTLVPEQVTVETGLLATTFKIGRAKAGACCGKAISNMYAELSTCEPAPSNV

SEQ ID NO: 115362 - protein, 57 aa, Gossypium hirsutum
  Clone ID: uC-gsflnu33B016d02b1.pep
LCFIATSVLPELDDHPCIYYALLFVMDHTIFLTHMYVVHLHPLFHTHNPFIHNILYY

SEQ ID NO: 115363 - protein, 54 aa, Gossypium hirsutum
  Clone ID: uC-gsflnu33B016g01b1.pep
SSHPSTHSNSGLFLIKSGFLYPIIIDLDPIFQTYINALKDVPQQSKPHAHKLKK

SEQ ID NO: 115364 - protein, 54 aa, Gossypium hirsutum
  Clone ID: uC-gsflnu33B016h01b1.pep
WIPLTLMSFSKVASVCPPSWTLYKARQIYSTPPFDWGRPSDEKTAAVDAAIPAR

SEQ ID NO: 115365 - protein, 45 aa, Gossypium hirsutum
  Clone ID: uC-gsflnu33B016h03b1.pep
KWGARVMNMGKVTKDQLFWCHNKLSKINFVHRKINVEPSLLLFPC

SEQ ID NO: 115366 - protein, 99 aa, Gossypium hirsutum
  Clone ID: uC-gsflnu33B018e02b1.pep
SNSPFILLLCHLFHLSRAFYTFSHFPLLLPVMHLPEPYVPSVPVSFLYLSPLPLSGLSSYPCFPGISHVASIVESVMVQLLAPDRTRLRTRDRTCRRRL

SEQ ID NO: 115367 - protein, 87 aa, Gossypium hirsutum
  unsure (1)..(87): unsure at all Xaa locations
  Clone ID: uC-gsflnu33B019d09b1.pep
MATRHLLYYSSRSPISHGLRPKFDILSSMFPQIEHGAAEQXSPSPSILSRNGIHSLPSIIIENRTSRVQYNGPKRSAVDRQIYEKTT

SEQ ID NO: 115368 - protein, 65 aa, Gossypium hirsutum
  Clone ID: uC-gsflnu33B022a03b1.pep
LYIGDFPTIPGFDYLTQCSGLCDKVPPCFSPGAVPMLIHFWVKDRNILYVTQRVFLVFVYRPHDP

SEQ ID NO: 115369 - protein, 83 aa, Gossypium hirsutum
  Clone ID: uC-gsflnu33B025d06b1.pep
VLLHSKTLSSLAQEMFATKAFFRRGFLISIGRWMGLRIFRRRKGSESLGILVGCSLTNERGSADDKILFSLVEFVVQDAWVRP

SEQ ID NO: 115370 - protein, 115 aa, Gossypium hirsutum
  Clone ID: uC-gsflnu33B026a11b1.pep
PQIPARPAESPGPPYKPPAPAPAAEAPTPPYKAATAAPAPPVEAPTPPYEPPTPAPAPPSIAPTSAPAAPSEAPTPPYKPRDPTPAVKSPTTPCPSYKPPIAALPPVMTKKDCMP

SEQ ID NO: 115371 - protein, 83 aa, Gossypium hirsutum
  unsure (1)..(83): unsure at all Xaa locations
  Clone ID: uC-gsflnu33B026a12b1.pep
PGGLLFWTTFIGLLGYMITAGMYTTAISVVWTLAELIRSPRVQDKAHXELDRVIGXEGMMPERSLYNLSYLKXVSKEALRLHP

SEQ ID NO: 115372 - protein, 83 aa, Gossypium hirsutum
  Clone ID: uC-gsflnu33B026d03b1.pep
NKAAEGRALSTVRVAQCVESPTGGAYLPLQRASKMAFRLSNLCGGRPGFASSLVGKLGPGECISGPLRRGKSGFCQGTEMWDP

SEQ ID NO: 115373 - protein, 96 aa, Gossypium hirsutum
  Clone ID: uC-gsflnu33B026d05b1.pep
GGGRFLGSLFSCRSLRNYLFFFVGPCFNSWGRVLPPVGGGSPGFSPFFCVVATSPFFCGGNLKKAPSRRLSSKLLPLLWCLAPPFSWPFLPVGWVV

SEQ ID NO: 115374 - protein, 65 aa, Gossypium hirsutum
  Clone ID: uC-gsflnu33B026d10b1.pep
KCGHPCCGYWCGSNMWCRLIMYVSYVVGVASADMTVEEDMHFTCVEPNDMARDVPSRVGRMADGA

SEQ ID NO: 115375 - protein, 116 aa, Gossypium hirsutum
  Clone ID: uC-gsflnu33B026e12b1.pep
FAYGSPSLYCVYLIGIMAGNRIAAIPPSALAFNPSTDAGPTLVYGTGFSRFVEPAYVSVRYSFPRLVGLANLTSLGELSRVPLSTSFAPTITFMVWGMNVTWPQENLLIHMATCKI

SEQ ID NO: 115376 - protein, 79 aa, Gossypium hirsutum
  Clone ID: uC-gsflnu33B026f01b1.pep
VCKKGTRMGEAAKVIGDCASPYRFGEALGLEMTGVAYAYIYDEPVDDVSEEMTRCRADHMRVATVSTQAKQSDVECVTL

SEQ ID NO: 115377 - protein, 107 aa, Gossypium hirsutum
  unsure (1)..(107): unsure at all Xaa locations
  Clone ID: uC-gsflnu33B026h06b1.pep
AYLSQIAEHAKRYEAMDQLMQNLRAXSTTASELTXEERNLFSVAYKNVNRSVRAGRRTVLYIEHKEESRKNQEHVRLRKEYXSEVESLASDVRTSILNLLDSYLIPS

SEQ ID NO: 115378 - protein, 86 aa, Gossypium hirsutum
  Clone ID: uC-gsflnu33B028a10b1.pep
ADAPLHRPRLYTLAGPTHAYVLAGLFINITALMIHLTDNIGNTHICYLTLPGGRSNGPILRTTFKALPTFAMVLLLNNQLTGCIRL

SEQ ID NO: 115379 - protein, 61 aa, Gossypium hirsutum
  Clone ID: uC-gsflnu33B028a11b1.pep
FYTIGDVGCRLPVLVSMHPLDSPPCMPAHRSVFVAESGNPPMYISSRSFLFGSQTSTRCGR

SEQ ID NO: 115380 - protein, 61 aa, Gossypium hirsutum
  Clone ID: uC-gsflnu33B028b02b1.pep
FLFPAVKWPPCHMPLGIFLMNVWPYSYGRYTCAGPPLFSPAKHSFRSQPQTHFNAQTVHTK

SEQ ID NO: 115381 - protein, 55 aa, Gossypium hirsutum
  Clone ID: uC-gsflnu33B028d05b1.pep
TKAESMSKHKAFDTRYVGFYATMRYTYDTTLNNRSPTTGVLLAVLVLHACSIYVA

SEQ ID NO: 115382 - protein, 77 aa, Gossypium hirsutum
  Clone ID: uC-gsflnu33B028f05b1.pep
DHGSKKKKKILRYEKLRGGPFEGAQVYDRGMGKKKFFKGAPKINFRGGAFKQGGEGKNTGGNQIKGPGKKTPFGRGG

SEQ ID NO: 115383 - protein, 121 aa, Gossypium hirsutum
  Clone ID: uC-gsflnu33B028f07b1.pep
LETDEPIVITAVEGHHVRSHRTNHGHHTSSEDVHGCDVHEGESGTAAAFVCWRDAHDGKGQTAELGVDAVDHAKKSTSCMLFDGDLREEHYSSVSAVQTVLRATGTGCSDCTLEMEKLTGD

SEQ ID NO: 115384 - protein, 63 aa, Gossypium hirsutum
  Clone ID: uC-gsflnu33B028h06b1.pep
AQSNNYSVSEDIQSISTNIPSIKTGSVPEQEYRTSNTTIRASAHLSYNSAITVIYLYFDPFGR

SEQ ID NO: 115385 - protein, 63 aa, Gossypium hirsutum
  Clone ID: uC-gsflnu33B028h08b1.pep
SDQGLQLLCSADREPAHWSSSPFCTSSWRRLLELWSHHCIYRCHESVHASALASDHASAHAYK

SEQ ID NO: 115386 - protein, 140 aa, Gossypium hirsutum
  unsure (1)..(140): unsure at all Xaa locations
  Clone ID: uC-gsflnu33B035a02b1.pep
SAFLRPVKGQRKTSNNLTHGADFTKAKRIIQWKTYVCAESMQANGSALGSCDPTDGHLSLDFAPYLMATLSYIIIVEPASWPAPEHGIWKAYPXTDTNISGQAVDSGIGGPTAATAVWVNCHKLVITSCGDCRAVISNNG

SEQ ID NO: 115387 - protein, 57 aa, Gossypium hirsutum
  Clone ID: uC-gsflnu33B035a06b1.pep
RTNHESRHGPEGYSHNKLSTLNAMVARLRMGLTRHSHRLHQNVGVLGTTKDVSRRSP

SEQ ID NO: 115388 - protein, 44 aa, Gossypium hirsutum
  Clone ID: uC-gsflnu33B035b03b1.pep
PTLVVRSNYMTDYDLITRCTPFNYLQPKRPSEAKEIEELLPSTP

SEQ ID NO: 115389 - protein, 53 aa, Gossypium hirsutum
  Clone ID: uC-gsflnu33B035b07b1.pep
GYMVSVETSAVHPFRSDFTFVVSKWINAGNVNIVPQQALLTIIFSVFAKYGSF

SEQ ID NO: 115390 - protein, 80 aa, Gossypium hirsutum
  unsure (1)..(80): unsure at all Xaa locations
  Clone ID: uC-gsflnu33B035c02b1.pep
GTAWFRMSYELIMVDRQCVYECQIEFTPYFKLLRLSMKVCRSWVVVTXCVAGSIGGGSFDAAAEGDSIANREHADLNPNE

SEQ ID NO: 115391 - protein, 81 aa, Gossypium hirsutum
  Clone ID: uC-gsflnu33B035c05b1.pep
LPPDTPTFFILFKLEGPCPFVPDSVLPLCVPLALCTAKIILPLPTSLPKLLISVRSSPASKWVQRSINSPSIVYHVPRSHK

SEQ ID NO: 115392 - protein, 127 aa, Gossypium hirsutum
  unsure (1)..(127): unsure at all Xaa locations
  Clone ID: uC-gsflnu33B035d01b1.pep
LSLIRPITNQEGLKKVCRTDTYSVGRPEKASHPEALKAALAKLISSLILELAGSGXERLLTCXADNSATTHSVLVSNTHSHGSRLSVSVTRGASIXMCGAKPRTHLXAFVGGNITCWRGSNYWIDQQ

SEQ ID NO: 115393 - protein, 62 aa, Gossypium hirsutum
  Clone ID: uC-gsflnu33B035d06b1.pep
WPSLFHLESKSPWASGGCKNQPKGPRARLVIGIIFVLNNGINVWVKDEWGIWQSLHWFPVFL

SEQ ID NO: 115394 - protein, 81 aa, Gossypium hirsutum
  Clone ID: uC-gsflnu33B035d10b1.pep
PSAMGESCPCPSSSRTVIVYALVFCSFHVEPYGWYCHHDLSQASACDVMWFCLPPLVHPSIYAFPSWRICRLATCVKHCLH

SEQ ID NO: 115395 - protein, 43 aa, Gossypium hirsutum
  Clone ID: uC-gsflnu33B035d11b1.pep
RMRFHPSGTHFRSDQRSSMLGSAITRFTIGMLLNFFLCTKEMF

SEQ ID NO: 115396 - protein, 81 aa, Gossypium hirsutum
  unsure (1)..(81): unsure at all Xaa locations
  Clone ID: uC-gsflnu33B035e04b1.pep
MDLCKTPIDGFSSLVSAASNTCYWSGSIIIPPDTLYEGGLCNXAITSYPANYANRPTSVKVTAETRHANAYRCGRDGISVL

SEQ ID NO: 115397 - protein, 74 aa, Gossypium hirsutum
  unsure (1)..(74): unsure at all Xaa locations
  Clone ID: uC-gsflnu33B035e06b1.pep
YPGGWDLMEPTLRVLQAMMREAGSEPHEGERKCETLRPIMKMGHXKRRYIVDPYHERKAIXKGIXEICSDQGYA

SEQ ID NO: 115398 - protein, 67 aa, Gossypium hirsutum
  Clone ID: uC-gsflnu33B035e10b1.pep
TARPSRSFWLRLGCPYCHASVCDRFVSSCCCNSRRWAIVRSRPFPGGLVTGSHSSARCSRDACGDCG

SEQ ID NO: 115399 - protein, 76 aa, Gossypium hirsutum
  Clone ID: uC-gsflnu33B035f02b1.pep
SSHACGRTQVGACFEVCSYDSTTFHQIYIEDGFINVRGLKGGLIILGSLCATEAISTGVTDLRHGDTHEWGKAEGN

SEQ ID NO: 115400 - protein, 99 aa, Gossypium hirsutum
  Clone ID: uC-gsflnu33B035f05b1.pep
AQSYKMVPLWSFRQGTSQTTGLQVSICPALQQRFLRNRAAQAVVPRHSGAERHAYPQHHASGPKSVGALHAAAFEEKRPASVQPVKSGPVQEASCIQYS

SEQ ID NO: 115401 - protein, 89 aa, Gossypium hirsutum
  unsure (1)..(89): unsure at all Xaa locations
  Clone ID: uC-gsflnu33B035g02b1.pep
MNIPQRLVTGEERSCLSIAPIANPLLANXLSKNTLKLVRKASEHTCLKSGVMEVVKCILGWPKXIFVIAGNISTTEEITYVPIXLCEEA

SEQ ID NO: 115402 - protein, 76 aa, Gossypium hirsutum
  Clone ID: uC-gsflnu33B035g03b1.pep
SFTRPTAKLIWRPRDPCLRLNTYLFRNYVCGSHTKIFRTFGVPCTPTMRGTQNNIDAATYTKDLGWPYPDLVCKKA

SEQ ID NO: 115403 - protein, 42 aa, Gossypium hirsutum
  Clone ID: uC-gsflnu33B035g05b1.pep
ATSFPPQALNSFKQKVHFLKMFVKVLFCREYLSSLWRRVAST

SEQ ID NO: 115404 - protein, 44 aa, Gossypium hirsutum
  Clone ID: uC-gsflnu33B035g07b1.pep
KMLNKNIVENYAQEMNLDMTHEFFTKMSLSNDKKEVEEWATGSG

SEQ ID NO: 115405 - protein, 54 aa, Gossypium hirsutum
  Clone ID: uC-gsflnu33B036c09b1.pep
PSSKAKSLIDFHIVRTSSIVLFSYFNDGLHCSFTHTTTQSFPSFEPKPFGVRGT

SEQ ID NO: 115406 - protein, 61 aa, Gossypium hirsutum
  Clone ID: uC-gsflnu33B036d02b1.pep
YYIDTEKKQKTKGGIHVKFWVKSHECKFDAVGDSSRRLQHTGWFSIVIFEALHTQFLLSGV

SEQ ID NO: 115407 - protein, 41 aa, Gossypium hirsutum
  Clone ID: uC-gsflnu33B036d11b1.pep
HLNCSPKLYTIFVPHDRRDVYSRLIGRDISSIPIFFINNLY

SEQ ID NO: 115408 - protein, 59 aa, Gossypium hirsutum
  Clone ID: uC-gsflnu33B036e06b1.pep
GVGVINLVFHQAVALLAIGLQLGFFSAFLCLFCLVFCRIPPIVFLSPPIIKGVRSGSMA

SEQ ID NO: 115409 - protein, 42 aa, Gossypium hirsutum
  Clone ID: uC-gsflnu33B036f02b1.pep
AYAMRLTHWFLAITADDVSTLVTNILTALIASRRQTSDIGAL

SEQ ID NO: 115410 - protein, 139 aa, Gossypium hirsutum
  Clone ID: uC-gsflnu33B036f03b1.pep
WTHASALVSAQLHPHNRGIDTVGTVDSPSLFPNRAPSGRVLLLNNIGGATNTGILSKTEGELEEADDRDLRKMLINPNAQEPLVLGVRVWPHAIPQILVGHLHLLDSAKMALRDSGNHGLYLEGNYVLCVALGRSVEGA

SEQ ID NO: 115411 - protein, 69 aa, Gossypium hirsutum
  Clone ID: uC-gsflnu33B036f06b1.pep
LPVFMKLIVIKGNPICGAMLTFVMLSMPYFFVERQIYENGLEVPRHTLEYPSRSHLKPPTIQFIVNPML

SEQ ID NO: 115412 - protein, 43 aa, Gossypium hirsutum
  Clone ID: uC-gsflnu33B036g02b1.pep
HAYQEQPSDDGRPLYVLEDGNEKPDTEQGKSCRGLCFETPLDH

SEQ ID NO: 115413 - protein, 81 aa, Gossypium hirsutum
  unsure (1)..(81): unsure at all Xaa locations
  Clone ID: uC-gsflnu33B036g03b1.pep
RALFHKTLAYVVDPLVADYYVEXASTAGNHLMXCIESQVESDSDNRDSIVYPSNVPPCILRKRHFGALESALYISFKNRAL

SEQ ID NO: 115414 - protein, 36 aa, Gossypium hirsutum
  Clone ID: uC-gsflnu33B037b10b1.pep
LLSRTSQHGAKGDFKKIFRDFTQTPITPTNSIPIKT

SEQ ID NO: 115415 - protein, 152 aa, Gossypium hirsutum
  unsure (1)..(152): unsure at all Xaa locations
  Clone ID: uC-gsflnu33B037f07b1.pep
MNGSLPGPSLHFADYPSKAPLENSGHPGMAMAASLASAVGPRVAAACAXHSLAAMPEDVHKEGPGHGHRMNMESVHSTEGGLHGSVHQKEISALPSFCQNEAYGHPLSAEKVKAAAKSCLAAATMKAKLVADHAERXIERSSVNIINHPVQR

SEQ ID NO: 115416 - protein, 82 aa, Gossypium hirsutum
  Clone ID: uC-gsflnu33B037g01b1.pep
FQMCKASVVPMLSQPPLRQTGLVWLVAIEPLCVVASTQRNRFSCVCFYHQGVCHCNYLSTAWMVIVLPIREMVMEHVVHTMM

SEQ ID NO: 115417 - protein, 87 aa, Gossypium hirsutum
  unsure (1)..(87): unsure at all Xaa locations
  Clone ID: uC-gsflnu33B037g09b1.pep
AARNMDAALQSRMLKQKQVVDLMIQGLQIAHESNQILGNITIATHVYLIMXVTFAVLRAEMGDLSARLESLNEINGFNKLEQCGFRI

SEQ ID NO: 115418 - protein, 46 aa, Gossypium hirsutum
  Clone ID: uC-gsflnu33B046d04b1.pep
DHLHSTRIPFFYNRSTNTFPCPRSVNVSRCHYNPSQVYPFLPSCTK

SEQ ID NO: 115419 - protein, 46 aa, Gossypium hirsutum
  Clone ID: uC-gsflnu33B046d10b1.pep
CPTEARGSKEELIDSYFAATELTNIKCYCFFSFLSLNPQYSLSSIA

SEQ ID NO: 115420 - protein, 51 aa, Gossypium hirsutum
  Clone ID: uC-gsflnu33B046e09b1.pep
IQVNGRCITPSRQGKHWRNPTKIPCRTSPSRTAGVIKNTPSPIDPANRRAD

SEQ ID NO: 115421 - protein, 64 aa, Gossypium hirsutum
  Clone ID: uC-gsflnu33B046g08b1.pep
HYLWVTLIHPVLRLGRLSSLISFTSIVFWGGLLSGLNHIIARCMSSRYVVSCSAMMCSFGVFKI

SEQ ID NO: 115422 - protein, 49 aa, Gossypium hirsutum
  Clone ID: uC-gsflnu33B046h05b1.pep
KGSSWSLVGLFSLTDFVPGPYMIREMADSARDRCVYDRHRICTIAVQVI

SEQ ID NO: 115423 - protein, 117 aa, Gossypium hirsutum
  unsure (1)..(117): unsure at all Xaa locations
  Clone ID: uC-gsflnu33B051b01b1.pep
TGCSRCRRRIVNKLSEKQWRETEEGKAKAQVAKAQPDDVSDFYQXKSSKGMSQLVXEDEVQDDLEXCATGEHGKDAGDAKKLNRILELTGLSDLGYAEAXYETGHYYDIGLDVTVIN

SEQ ID NO: 115424 - protein, 29 aa, Gossypium hirsutum
  unsure (1)..(29): unsure at all Xaa locations
  Clone ID: uC-gsflnu33B055h09b1.pep
CLRVRKNCRSWGDLIADVLYIPXGSMSSY

SEQ ID NO: 115425 - protein, 124 aa, Gossypium hirsutum
  Clone ID: uC-gsflnu33B056b12b1.pep
LQEIIAPNEGGNYWIREWKIKKQGDPLVKGGLASDAQLHGNFKFVLSNQEKEVEDYHDQLGQSHGRTKKKRFESNTEAELGFLLERALRFRLLWQDSLNHGVCHSLQSCCLLPGLVKVKNLISS

SEQ ID NO: 115426 - protein, 35 aa, Gossypium hirsutum
  Clone ID: uC-gsflnu33B058c11b1.pep
PKIHTYGINCYSQTSHCHSIVPSIPLRLRFGRTRS

SEQ ID NO: 115427 - protein, 103 aa, Gossypium hirsutum
  unsure (1)..(103): unsure at all Xaa locations
  Clone ID: uC-gsflnu33B059d06b1.pep
ITAALSRSSVHSRMALCMIACPKVRTEYVTCETMAPAXLRHMVTDHAHRWIIEDHCDGETMYANHSYQTKAECTERYPMGVPHVRCIYPDAVQSRIDRLAHIR

SEQ ID NO: 115428 - protein, 34 aa, Gossypium hirsutum
  Clone ID: uC-gsflnu33B059e02b1.pep
QSKINTSRQSVHSANEKEVRNKYKLNNLLQVLMR

SEQ ID NO: 115429 - protein, 58 aa, Gossypium hirsutum
  Clone ID: uC-gsflnu33B059g05b1.pep
LNGIKKRKKKNSRNMFTSSVHIVDYELESHMKTQEVKIRKQKKQKKKAALAYYDNISK

SEQ ID NO: 115430 - protein, 75 aa, Gossypium hirsutum
  Clone ID: uC-gsflnu33B059h11b1.pep
TAVEAGDDGITSTEGENNVTSTPHVDHHECSERDSRDHSAMRGLDCEQRVNATRTFHEEAEEKLPGSEESSRGNA

SEQ ID NO: 115431 - protein, 58 aa, Gossypium hirsutum
  Clone ID: uC-gsflnu33B064c02b1.pep
LTQHGTRKTHNQALLEVFEGCNRLHVIYFDLANRDKNGDFSHVPKTGGPVLRQLCRGF

SEQ ID NO: 115432 - protein, 43 aa, Gossypium hirsutum
  Clone ID: uC-gsflnu33B064g08b1.pep
SMRILDMRNVENSFTEGSLKMANVQVAEFHQDGGCYLISLAVI

SEQ ID NO: 115433 - protein, 204 aa, Gossypium hirsutum
  unsure (1)..(204): unsure at all Xaa locations
  Clone ID: uC-gsflnu33B071a03b1.pep
FLLALVGITANQGFYLLGLDNTSPTFASAIQNSVPAITFLMAAILRIEKVRLDRKDGISKVIGTILCVAGASVITLYKGPTIYSPVPPLNRPTPTFVSLGDANGKSWTLGCLYLIGHCLSWSGWLVLQAPVLKKYPARLSVTSYTCFFGLIQFLIIALVFERDSQXWMFHXGGELFTILYXGVVASGIALQYRYXCIDRGGPGF

SEQ ID NO: 115434 - protein, 139 aa, Gossypium hirsutum
  Clone ID: uC-gsflnu33B071b10b1.pep
SNFQGIGVSPWMQSRLDASMLGLQTDMYQAMAAAALQEMRTVDPSRSGTASLQFQQPQNGPCRPAALMQPQMLQQTLPQAILQGVEDNQHQSQPHLLQQQLQHQNSFNNQQQHQQQPLFNNQQQQQPQHSMSQQHQQLG

SEQ ID NO: 115435 - protein, 66 aa, Gossypium hirsutum
  unsure (1)..(66): unsure at all Xaa locations
  Clone ID: uC-gsflnu33B071d06b1.pep
KKGGGMCFKQTNNPLIIYIIEQSTIIIIRKRKKEGRKHNXHHTLPLTAQLSSVNQILLIKKNEDTP

SEQ ID NO: 115436 - protein, 192 aa, Gossypium hirsutum
  unsure (1)..(192): unsure at all Xaa locations
  Clone ID: uC-gsflnu33B071d08b1.pep
RLTMSWFVPSLRACEGDVCAEPRKAHEVAFFLAIYLISIGTGGHKPSLESFGADQFDDDHPQERKNKMSFFNWWNSGLCSGLLLGVTVIVYVQDHVNWGXADIILTVVMACXLLIFIIGRPYYRYRMPSGSPLTPMLQVLVAAISKRKLPHPFNPADLYEVPNSQRLRGGFCVHQELKFLXRAAIVEERRII

SEQ ID NO: 115437 - protein, 66 aa, Gossypium hirsutum
  Clone ID: uC-gsflnu33B071e10b1.pep
PSCITTYISPCTGIQYLCRLFLMKLDSKRNLYIYRMTSNYLWLIYSEFPKSDQGIQKSLWPYSTKT

SEQ ID NO: 115438 - protein, 163 aa, Gossypium hirsutum
  unsure (1)..(163): unsure at all Xaa locations
  Clone ID: uC-gsflnu33B071e12b1.pep
VHASEKLKEFLVTVGFVGSKLDASLFVSCTXDSTLYVLVYIDDIIVTGDVPTIIDGIGKLLIVEVSVKDMGDLYYFLGVEFTQIRAAYXSILCQREAMSRDLLERSSMTIDARAYTPMSSSSNLSKGDGNSMSDPSEILSLARALQHVVLTRLDPEDATGMTC

SEQ ID NO: 115439 - protein, 190 aa, Gossypium hirsutum
  Clone ID: uC-gsflnu33B071f12b1.pep
SPTRPPTRPEAPSADELFSDGKILPTDIKKSNPSKQIDHSSSPPPPPLPPQKAAESSKEEEKQSSKPTSFWGFKRSSSFSCGSGYGRSLCPLPLLSRSNSTGSTPNAKHPSPNNPKHIHSHKHAAANSITNPSFKSSTSYHQKPPLKKTAYKPYYGNGVHPVLNVPSGNLFGLGSIFFNGNKAKDSCKRK

SEQ ID NO: 115440 - protein, 148 aa, Gossypium hirsutum
  Clone ID: uC-gsflnu33B071h03b1.pep
ISPTFLSAYLLLLCLVCCLKEGYGLGRRATAESHHLEHSHTIQVTSLLPSSICSPATKELNKKSSLRVVHKHGPCSQLHRQDKANIPTDAEILRQDESRVKSIHLKLARSSGSSNVDQIDATNLPARMVAVGVRHYVVTVGLGTPKKI

SEQ ID NO: 115441 - protein, 70 aa, Gossypium hirsutum
  Clone ID: uC-gsflnu33B072b06b1.pep
FFVRFHCLKKWREEMLAFEAMNHLNDYGVSKGNNPFGLRQLELERWENADRELELGAFSYCLPHLQVYLL

SEQ ID NO: 115442 - protein, 44 aa, Gossypium hirsutum
  Clone ID: uC-gsflnu33B073a12b1.pep
SQPNSKLIYCIFDPNLIRLVLYLNRIIFLYSLYYFCNDIYQSFF

SEQ ID NO: 115443 - protein, 43 aa, Gossypium hirsutum
  Clone ID: uC-gsflnu33B073f11b1.pep
TLSLALSLVSSMFAAIICLFFFLHNGLYFMWAIYIVIISSLLF

SEQ ID NO: 115444 - protein, 61 aa, Gossypium hirsutum
  Clone ID: uC-gsflnu33B073h05b1.pep
FRVRPRCSSKSGANSSPSCDKITRFSSPSYHSLPNLRVSILQQTPKEIFVSAKNLEKKSPC

SEQ ID NO: 115445 - protein, 54 aa, Gossypium hirsutum
  Clone ID: uC-gsflnu33B074f05b1.pep
QYIIAEACYFSRLIFSHNCSAFSKLSHKLHGSLKQFDPHLHPCHNFRAAHVWSA

SEQ ID NO: 115446 - protein, 40 aa, Gossypium hirsutum
  unsure (1)..(40): unsure at all Xaa locations
  Clone ID: uC-gsflnu33B076c02b1.pep
SCASLIRHQGISTXNDRPPQLCVPRAMISNQSHSFGVKRK

SEQ ID NO: 115447 - protein, 65 aa, Gossypium hirsutum
  Clone ID: uC-gsflnu33B078b02b1.pep
CKEVYYMRTTLPMGATIRLITQTFGVMATHSTPRRDILLGGLLLMTVIDVHGWHDHLDDGYDSIL

SEQ ID NO: 115448 - protein, 110 aa, Gossypium hirsutum
  unsure (1)..(110): unsure at all Xaa locations
  Clone ID: uC-gsflnu33B078b06b1.pep
FIEFMKGKEDTIDVFVGTVTDNIKAYEVTALQATVLRLTETARARIEKAVVECLTLDQLAMRAPLXQNTILLTVTKKFGEALKHXDTAPGVPHSHTKPYVRSKGRKNERA

SEQ ID NO: 115449 - protein, 56 aa, Gossypium hirsutum
  Clone ID: uC-gsflnu33B078b12b1.pep
SVSWVPLECQTVFLFVSSKTSSQYLTRIPVISGMFTKHITSCNVQVSTLSWLFSHR

SEQ ID NO: 115450 - protein, 101 aa, Gossypium hirsutum
  unsure (1)..(101): unsure at all Xaa locations
  Clone ID: uC-gsflnu33B078h02b1.pep
LDMLAEXTSXEGAKNCLFEGQTHRSTSLCLGHNIKEFDMTWMEICSTPDAEKCAEKDWTFWRCVQNTPNSVEADSEPATVVGSSNVPETLDGPAKFQMVGR

SEQ ID NO: 115451 - protein, 42 aa, Gossypium hirsutum
  Clone ID: uC-gsflnu33B079e07b1.pep
CLRATPAKKLIDPRAHVCAWGKGITARPAGAEVLGLQKQCKV

SEQ ID NO: 115452 - protein, 91 aa, Gossypium hirsutum
  Clone ID: uC-gsflnu33B080a08b1.pep
PAPGWCSAAPPLVGVLLRGPAPGGRGLLAAPPVWGLLFGCVPASSSGWCLRFVPCGFWWVFGCFSFCFPPFFFFLFGLLTTAWVVPGVPGR

SEQ ID NO: 115453 - protein, 65 aa, Gossypium hirsutum
  Clone ID: uC-gsflnu33B080a09b1.pep
CSSFNNWLRTSRPVRFSMPLSLLFQALFAFPLLALGIHHSRIIRKLGIYRDLVGFCGTCFSRPHS

SEQ ID NO: 115454 - protein, 84 aa, Gossypium hirsutum
  Clone ID: uC-gsflnu33B080b02b1.pep
FGVHQGFSHFTFVKTRAVNLILVALLKSFFVACTGSLNLGSLKGAPPFFFFFFFFFFFFFFFFFFFFFFFFFFFFCYKIPFPVH

SEQ ID NO: 115455 - protein, 28 aa, Gossypium hirsutum
  Clone ID: uC-gsflnu33B080b03b1.pep
YQIVKRVMARIQNCALLKQNHVHVTLTD

SEQ ID NO: 115456 - protein, 73 aa, Gossypium hirsutum
  Clone ID: uC-gsflnu33B080b10b1.pep
PPRSPPPPIGGSPPPFVFSSDGRKDGGASTPAPRIYQAGARPTSSYCGLRSERKDTLLFLIRDWGDRNRSQET

SEQ ID NO: 115457 - protein, 85 aa, Gossypium hirsutum
  Clone ID: uC-gsflnu33B080c01b1.pep
LGLGFLFGLGFCLSAFLWAVRRVCRVGFLPGSCRGRLLLSLCRFWGFFPRGGGAVWFHHPPPGFFCPWVFNYGVGGSYRPLGGGS

SEQ ID NO: 115458 - protein, 158 aa, Gossypium hirsutum
  Clone ID: uC-gsflnu33B080c02b1.pep
FLKSPLYDHTRGFQKKKNPKKPTEKKKKKKKKKKRGGRPRGAGAAPPGGPTPKPLQGATEGHSAGRAGTTDGAGKTPALPNENAGQNTPRPPGGANAKGPDPAPPPNQVPNRKGQGDAPGKGPKSPAGGGQPAGGTGTNGRSPTPPHCPHPPQPAWRR

SEQ ID NO: 115459 - protein, 74 aa, Gossypium hirsutum
  Clone ID: uC-gsflnu33B080c03b1.pep
RRPVPLFPGRPTRPTTPSNQPPSAGRPFMNHFASNPREQWLGLSYYSSNALFLRPSRANDLIRQTPTCALFFND

SEQ ID NO: 115460 - protein, 76 aa, Gossypium hirsutum
  Clone ID: uC-gsflnu33B080d02b1.pep
TSPTPKPSYDAEACFARSDPAMVGHGTIILMLSLHWERDHFFHRTQTHPLEVSWIPFRVPPGNRRKSLKTPAPSCA

SEQ ID NO: 115461 - protein, 85 aa, Gossypium hirsutum
  Clone ID: uC-gsflnu33B080f10b1.pep
MRQARVGVRSWHDAARSSGINSSGQTPALGNECHVAASCVYHRPLCSFHRQPVVSRLSLTMFGGPTEDRLIKASLMAGLGLEKKT

SEQ ID NO: 115462 - protein, 82 aa, Gossypium hirsutum
  Clone ID: uC-gsflnu33B080g04b1.pep
HFVRAEPAYQAELPEKIGFVAKNEEELPGQDRKAEEARGPATAPAAEAHHVGETKEKKGILEETRAKLAGKHAKSDEEKEKA

SEQ ID NO: 115463 - protein, 116 aa, Gossypium hirsutum
  Clone ID: uC-gsflnu33B080g11b1.pep
TSRAADPPGEHRQTGPSSPTKRRKKAKNMTRAAQDRKYNGGAADLKHAEAPGPSPKKEEAPSKAEAARINPIDRKRQEGAARPSVPGKNPHIPGTDAAGETGQGGPRRPETQRRGN

SEQ ID NO: 115464 - protein, 61 aa, Gossypium hirsutum
  unsure (1)..(61): unsure at all Xaa locations
  Clone ID: uC-gsflnu33B080h01b1.pep
EGNMPDVSRPKTYSMGLDLLLNNGTGPVPGSLSSAKVVRHXDPSHNHLCVTSPVGTPCDHN

SEQ ID NO: 115465 - protein, 95 aa, Gossypium hirsutum
  Clone ID: uC-gsflnu33B080h08b1.pep
VLGPGLCGGWSGCCPGLVLALVWPRGLFVWCLPGLWLLVGPLFPGRRVSLPGRWCFPAGSSLQPSLLCLCPSWGGRWPILFQFAPWCLLVRPRVR

SEQ ID NO: 115466 - protein, 70 aa, Gossypium hirsutum
  Clone ID: uC-gsflnu33B080h11b1.pep
VLRSPLVYSKSGLFCRRQTGSFHVGVGFPFGASSLDGLCCFLECACVSMVVLGNKPNSAESPWVLPGRRV

SEQ ID NO: 115467 - protein, 80 aa, Gossypium hirsutum
  Clone ID: uC-gsflnu33B081b01b1.pep
IGNTQGISKAHRGQTTASGVKQGAPKKKRCPPTPREVNLGPPKQTPIFRMTQIILVSAYSLSLFFNFFPVRCFCTRFFLY

SEQ ID NO: 115468 - protein, 66 aa, Gossypium hirsutum
  unsure (1)..(66): unsure at all Xaa locations
  Clone ID: uC-gsflnu33B081d01b1.pep
KLKPSHLDRIDTSGGCGASFAIVIVSEQFEGXRLLERHRIANAALEEEMKRTPALSKKYAYTIYPL

SEQ ID NO: 115469 - protein, 69 aa, Gossypium hirsutum
  Clone ID: uC-gsflnu33B081d09b1.pep
VQKLFSIVKPWPDPNSQRAVSKFQVQLQRNPYHIRYLKRKTLVMDKMNAEVYSVNCGWSDASDSAPLHV

SEQ ID NO: 115470 - protein, 84 aa, Gossypium hirsutum
  unsure (1)..(84): unsure at all Xaa locations
  Clone ID: uC-gsflnu33B081f12b1.pep
TQVSIYSNEGSKLHFFAVLAFDQIAFGVGVRAEQCLSAAKIVQEIEIKYRYRVFMXDISNGYGGGACWFFMGSQVLILRASPCF

SEQ ID NO: 115471 - protein, 74 aa, Gossypium hirsutum
  Clone ID: uC-gsflnu33B081g11b1.pep
RRPCAQSMALYPTANRQSWRHVKSEVPPGQGTSALAKRQAPNSSVDSRYDSRWINCVVCMDSANVVNAMRSLGN

SEQ ID NO: 115472 - protein, 127 aa, Gossypium hirsutum
  unsure (1)..(127): unsure at all Xaa locations
  Clone ID: uC-gsflnu33B081h03b1.pep
LVYYIRSRPCGESIANNSVHRAMQDDPTLAAAQWWMHYHDWTGKTWEGSILIDLTKDNXAQMDSPGNGRXRGYQATDDAPERLEDHGPGSGIKGDIGGRYAQDDIYSXQGPEDDIPKGRKDGRRPKI

SEQ ID NO: 115473 - protein, 62 aa, Gossypium hirsutum
  Clone ID: uC-gsflnu33B081h07b1.pep
LTFSKRVRSKKTPCWPPARTVPGSSRLHKGACKIGQTHRRGEKASSIPLGHWRCYLTMLACL

SEQ ID NO: 115474 - protein, 76 aa, Gossypium hirsutum
  Clone ID: uC-gsflnu33B082b11b1.pep
TSSVLTSHASLYIDFPNNQLYSILVSLSCRTTSHNRIFPSYVDSVPQVLLLALFILLMCRSTGLGSNSKISMISPL

SEQ ID NO: 115475 - protein, 82 aa, Gossypium hirsutum
  Clone ID: uC-gsflnu33B083a07b1.pep
LSQTGCHTPPLKIEGLLCSFYTKKPNIHRSMLYAASSAPTLVCSSAILSLSRATTLKTRMLKTPYRINKSPAWISSRVRTHV

SEQ ID NO: 115476 - protein, 53 aa, Gossypium hirsutum
  Clone ID: uC-gsflnu33B083b06b1.pep
KKGVARKEKMDLVCNGFFSYYWGAGFLVLIVLITLPLLWIFMLWIVIWEHLLL

SEQ ID NO: 115477 - protein, 67 aa, Gossypium hirsutum
  unsure (1)..(67): unsure at all Xaa locations
  Clone ID: uC-gsflnu33B083c10b1.pep
MYGHEEKLAQGLLXKGAQSVGRVKEQLWQVPETLXDDMFGKMRAPPKSEGPVNTPHDLSEADGIIFV

SEQ ID NO: 115478 - protein, 51 aa, Gossypium hirsutum
  Clone ID: uC-gsflnu33B083c12b1.pep
KNGVLITEQIELIALGIFSCRTATGTFGLICKITLPCIQTIHALEWQLEET

SEQ ID NO: 115479 - protein, 124 aa, Gossypium hirsutum
  unsure (1)..(124): unsure at all Xaa locations
  Clone ID: uC-gsflnu33B083d01b1.pep
SHTPADTGFASFADRLATKSSDKHSPLDWSGSFDGEEDGCIPHXYDAFYSYMAGTEGPVXIDYIGGGYCGLSXALPARTITVKARVVALDLTGHGKLFTENELELSIETMCTDVFAALKASYGD

SEQ ID NO: 115480 - protein, 51 aa, Gossypium hirsutum
  Clone ID: uC-gsflnu33B083e04b1.pep
GIRFSSPKTHGVPHEWLDHLCANIKIMDVEADPVSGSRVIFVMETLTATTP

SEQ ID NO: 115481 - protein, 118 aa, Gossypium hirsutum
  Clone ID: uC-gsflnu33B083f07b1.pep
RLRVRKKKKKGGREIKKKGGEKKKKKKEERGGRFWGSKVSFPCLGRNNSFLGGPYFFWLAGCSPRGAWENPFGSPTYLPFRCFPFSQLGFWQTGPSPSPFPSGAPPFWRLVLALWGRV

SEQ ID NO: 115482 - protein, 66 aa, Gossypium hirsutum
  Clone ID: uC-gsflnu33B083g07b1.pep
RVKYTLTERVPFPIKVVLRFGRSTGLSFITIKPSFEKSNFYKSINLGNIRFLPGNCLNHSSSVNEL

SEQ ID NO: 115483 - protein, 71 aa, Gossypium hirsutum
  unsure (1)..(71): unsure at all Xaa locations
  Clone ID: uC-gsflnu33B084a02b1.pep
VSGAPFCFRWPRVSSCQPLRSFLRVSAFLFSRLLRRCQWSFLGVSWGAGLLCWCCYYVLEPPSSWXLVSLS

SEQ ID NO: 115484 - protein, 52 aa, Gossypium hirsutum
  unsure (1)..(52): unsure at all Xaa locations
  Clone ID: uC-gsflnu33B084b01b1.pep
FLRPLKYLVDEGEWETLTCDADLEECRDIYKSSXCHTLKNSLHKAAHPNLGS

SEQ ID NO: 115485 - protein, 86 aa, Gossypium hirsutum
  Clone ID: uC-gsflnu33B084d12b1.pep
VASKGIGQPVYITHNVSNLVVNTGFLPSSSHGQLFGRKLDPSLITIYSASHVKQIFVANLSYVSTSVLSPASEVISRSSMDCNHVP

SEQ ID NO: 115486 - protein, 79 aa, Gossypium hirsutum
  Clone ID: uC-gsflnu33B084e02b1.pep
DSLSTSCINLNSIVHGHRPVFNLSSVLTCGWRMIASFHGTVALEGSESFTSSCPQDVLVMDFSFAPHNKRPAVGPGQVP

SEQ ID NO: 115487 - protein, 46 aa, Gossypium hirsutum
  Clone ID: uC-gsflnu33B084f02b1.pep
KAVKTPLTPDLKIEGLAAFRPHVGLQEMVFFLDTEPWLLLLCGRVR

SEQ ID NO: 115488 - protein, 33 aa, Gossypium hirsutum
  Clone ID: uC-gsflnu33B084f03b1.pep
GFWRSRNLSLANVVDCNRRTTKAPCQHHGLPKF

SEQ ID NO: 115489 - protein, 132 aa, Gossypium hirsutum
  unsure (1)..(132): unsure at all Xaa locations
  Clone ID: uC-gsflnu33B084f08b1.pep
MRPKGSQALNFKVLLLGVFFAFLLLFVLRSSISSSQDDTSNLQTFAAAKTSNGVKESKSGANCSPSCDKIPRSLAQALIHYATSSITPQQTLKEISVTAKILEKKSPCNFLVFGLGHDSLMWSSXNYGGRTV

SEQ ID NO: 115490 - protein, 74 aa, Gossypium hirsutum
  Clone ID: uC-gsflnu33B084g06b1.pep
SFVRKKPFCHLVRENLRHWRNSLLVREVIMPSKCKLCSNSDDSILPNLVYSTHDDDRYDFFLCYLFVYHEFGSF

SEQ ID NO: 115491 - protein, 89 aa, Gossypium hirsutum
  unsure (1)..(89): unsure at all Xaa locations
  Clone ID: uC-gsflnu33B084h08b1.pep
GLPTLCTEHTSPQIRGGFFDVAVIYTTTPIIVGNCTXFAVNRMFFPHTHAGLSLGERGTHVHRADRANTNVGMPMGPVWLADLGGFGAA

SEQ ID NO: 115492 - protein, 62 aa, Gossypium hirsutum
  Clone ID: uC-gsflnu33B085a07b1.pep
PLSHLPYPAAYHDRESRSRRGLFVISAKLTKDECAANRFSSLGRRFSQSFSSDASASEMYFK

SEQ ID NO: 115493 - protein, 84 aa, Gossypium hirsutum
  Clone ID: uC-gsflnu33B085b03b1.pep
GKVFRLRVPRRSFRVDPHARPHVRTVSSETSVSVPVRGLSWHAEESDGHNAKLIATCTWLLNTRRDSVPYRILPPGISAIATYG

SEQ ID NO: 115494 - protein, 84 aa, Gossypium hirsutum
  unsure (1)..(84): unsure at all Xaa locations
  Clone ID: uC-gsflnu33B085e05b1.pep
MSGLMFRKWTMMWWQTYVDDHLMYSTXASHLSAVAFIGQDCSVWAQSSSFPLFLLEDFXGIMNDFTEPXSIAPTGLYPGVCFSC

SEQ ID NO: 115495 - protein, 58 aa, Gossypium hirsutum
  unsure (1)..(58): unsure at all Xaa locations
  Clone ID: uC-gsflnu33B088g06b1.pep
XHPKTLTLFPCFSFLFCKIDLVLLLPKSGIFAFVLLILIRFDSIYTQYIPLSAIAISS

SEQ ID NO: 115496 - protein, 49 aa, Gossypium hirsutum
  Clone ID: uC-gsflnu33B092a02b1.pep
LFFLGFFFFETKNICFSYQETLKQHQVCLVFSQQTCLRADSNVLTEKQT

SEQ ID NO: 115497 - protein, 68 aa, Gossypium hirsutum
  unsure (1)..(68): unsure at all Xaa locations
  Clone ID: uC-gsflnu33B093h01b1.pep
TQTFHTPGFKLHVLVXLQHLFYLIESGLLTEPLGDAGTVPYSYPNNGMLFRQFTIKLLGTSFPNMTAV

SEQ ID NO: 115498 - protein, 65 aa, Gossypium hirsutum
  Clone ID: uC-gsflnu33B099h07b1.pep
FFLDTLHIPRSQGKKACLLHKAIHFYSQMINVRRMLCPISQKSYKLQNPHHLNLVRLSWIWTCRT

SEQ ID NO: 115499 - protein, 81 aa, Gossypium hirsutum
  Clone ID: uC-gsflnu33B100b12b1.pep
FFIAPSVFDSWHIVNSFVCLFVCTMQDLIVLDLMSSQLLGAFPSSTALLTSLAANSSFSASSPCSPLAHRYHSVLAVRLCP

SEQ ID NO: 115500 - protein, 87 aa, Gossypium hirsutum
  Clone ID: uC-gsflnu33B100d04b1.pep
DNKFSLESCRILRMLENRKSKRPHQSKGSLHSMQAVHWRIPFGRCHRQINHVGFRCSILISTVVARPRCSYRQAHKMIWLDPYIQTR

SEQ ID NO: 115501 - protein, 116 aa, Gossypium hirsutum
  unsure (1)..(116): unsure at all Xaa locations
  Clone ID: uC-gsflnu33B100e05b1.pep
VTTAANAEHTKPESCQVATSTGLDRRAIEPITICLIEAGGXIDYHLCQKTMTXTHDKELALDANNDTAKTILTPDFVTGAVLVNEHLLNITRENRLEGLLKEELHQIYPGAMSTTA

SEQ ID NO: 115502 - protein, 75 aa, Gossypium hirsutum
  Clone ID: uC-gsflnu33B100e07b1.pep
TGYIYPEVPKTCTSLGAHKFTGSLVLLAMAAWSKPSDLHGASRGATWRPEKSCTANKLATILYTAGALALEPKCY

SEQ ID NO: 115503 - protein, 89 aa, Gossypium hirsutum
  Clone ID: uC-gsflnu33B100g03b1.pep
ARTPPVERPTGQKPSKQGAARQGPRHGEATQRPRSRGQETRKKHRQTTSSAPQSTEPPNRTPVHGRGFLGLYLAYISPFFFYEDLTQND

SEQ ID NO: 115504 - protein, 62 aa, Gossypium hirsutum
  Clone ID: uC-gsflnu33B100g12b1.pep
MWRGLLREWIHTACNNKMNRVQVCYTQKPLFFYDNLAKRYMQQYNEVERSALGMVIATDVTI

SEQ ID NO: 115505 - protein, 55 aa, Gossypium hirsutum
  Clone ID: uC-gsflnu33B101a08b1.pep
NFHVLRTKTTLSALAKSTTYGTSAPGIVACDIILISFNLLYYGNYPISTRRTIDT

SEQ ID NO: 115506 - protein, 94 aa, Gossypium hirsutum
  unsure (1)..(94): unsure at all Xaa locations
  Clone ID: uC-gsflnu33B101a11b1.pep
YSKHHINKLRKGQLKSILQLRPNEKGGPRTGGPTTTRPGNHPTGLEDTPNRPGKRPEGGKTLVKSRQTMTPLGERNEVAKNTQGPHQKSXTTQP

SEQ ID NO: 115507 - protein, 89 aa, Gossypium hirsutum
  Clone ID: uC-gsflnu33B101c01b1.pep
KTHHAINFIAFFNIHNAQIRSILTHHANDHHYLTSLNLPHHLQYELYFQIQPFICYSQYSFHSSNLNFQKYYRKSSLNPPASAHASTQK

SEQ ID NO: 115508 - protein, 68 aa, Gossypium hirsutum
  Clone ID: uC-gsflnu33B101c09b1.pep
PRSSSVQLVIRHQCPQNSLLNQLFSIDASCDPLPIHASSTIPLFLHMTVPLGQYLLRDEFASVSFLYL

SEQ ID NO: 115509 - protein, 111 aa, Gossypium hirsutum
  Clone ID: uC-gsflnu33B101c10b1.pep
LVTPLWPMEWGTVPLENHTHIRITLRDGIKTSLCRGEHVTEPCTDQLTYLLAGIKETLRLRMGMPVLVPHMNLHDAELGVYDIPAESKMLEHAWCIATSPCDWTNPDLYRA

SEQ ID NO: 115510 - protein, 58 aa, Gossypium hirsutum
  Clone ID: uC-gsflnu33B101d09b1.pep
QQTGSFSLHRVICYICHLSSSPWYYVFTLRCIPSCYSQIVSSVLQAESSLAIPTGGIL

SEQ ID NO: 115511 - protein, 49 aa, Gossypium hirsutum
  Clone ID: uC-gsflnu33B101d10b1.pep
PRLMNVVNPLGTKLPLDNLRRGIRPFENPLFAITMDVVQIVGLFYRFLS

SEQ ID NO: 115512 - protein, 77 aa, Gossypium hirsutum
  Clone ID: uC-gsflnu33B101g09b1.pep
YIMISVNCREWACGSPVSIAVLQACMTFGRYGSVGQCVKSLVKVRACVCPSSSTGACKVRSCSGTSLSGGKSSKNNF

SEQ ID NO: 115513 - protein, 57 aa, Gossypium hirsutum
  Clone ID: uC-gsflnu33B108b06b1.pep
YHSHQLYAIIEAKASSSQTRTARSWSYLSIGLGSNRLLGPPSSPWVRSLQVLCRPSE

SEQ ID NO: 115514 - protein, 80 aa, Gossypium hirsutum
  Clone ID: uC-gsflnu33B108h02b1.pep
FRSSSPLRCRLICIDNHLIGGYSEKEAMALCIADLILVIPESNFFNSFRLLPHSRASSSGPFGYNVSELKNHFMLSVSRL

SEQ ID NO: 115515 - protein, 116 aa, Gossypium hirsutum
  Clone ID: uC-gsflnu33B109c02b1.pep
GKREFGSKGFNLGYPGFFPFPRFLTAGPEFYFGCPLKKLLRFMPGVVNFGPLKRPPPFIFFFFFFFFFFFFFFFFFFFFFFFFFFFFFFFFFFFLKRNGIYFSQQISFLQDDIGNP

SEQ ID NO: 115516 - protein, 72 aa, Gossypium hirsutum
  Clone ID: uC-gsflnu33B112e01b1.pep
PSWGQVLRGRSICMALQELGMHWRHQMKAAAKARLPAIALHSSGCRLYYRPPEPGTADKKDLVHEVRALLEL

SEQ ID NO: 115517 - protein, 97 aa, Gossypium hirsutum
  unsure (1)..(97): unsure at all Xaa locations
  Clone ID: uC-gsflnu33B113e04b1.pep
MDATTALVASRQVSPREAAIHMMLSAADHFVTMNWDCHMDRYVVKRVNDGIYINNLGTTXEKLQLASRVNDAIENRQEIRVQSARPYGQRACLVICS

SEQ ID NO: 115518 - protein, 89 aa, Gossypium hirsutum
  Clone ID: uC-gsflnu33B115a09b1.pep
WTRGKKKKKKKKKKKKKKKKKKKKKKKKKKKKKKKKKKKKKKKKKKKKKKKKKGGGFLGDQFFFPGVGKLKFFFCGTKIKFKGRLFKTF

SEQ ID NO: 115519 - protein, 97 aa, Gossypium hirsutum
  unsure (1)..(97): unsure at all Xaa locations
  Clone ID: uC-gsflnu33B129g04b1.pep
SAWKGVGLDYSFLDXKKEGADAGKLEKWVGLSAXNKVFKRAANSFLKLPDKHKAVLHPTKSVQVSPAIPSSIXRPVVEHAVGVLVGIKKSQWQVALS

SEQ ID NO: 115520 - protein, 107 aa, Gossypium hirsutum
  Clone ID: uC-gsflnu33B130a07b1.pep
NSGTLVRGPLDVSFAEGDRNIASILWVGYPGEAGGKALAEVIFGDFNPGGRLPMTWYPESFTKIAMNDMNMRANPFRGYPGRTYRFYTGNRVYGFGQGLSYTKFTYK

SEQ ID NO: 115521 - protein, 55 aa, Gossypium hirsutum
  Clone ID: uC-gsflnu33B131d06b1.pep
SFRPRKRTHRGGQLCVRAHATTHKRKWQGLMAPHKHTLTTPKLGNIGGDRTYCQA

SEQ ID NO: 115522 - protein, 41 aa, Gossypium hirsutum
  Clone ID: uC-gsflnu33B132f03b1.pep
FLSDDRLRDDKLKGLWGQYGAITYYNVMPFPSGGSRGPCPV

SEQ ID NO: 115523 - protein, 32 aa, Gossypium hirsutum
  Clone ID: uC-gsflnu33B133c06b1.pep
FWGIPSLSWFSGPGTSGPGLKTAGYSLKSPLS

SEQ ID NO: 115524 - protein, 49 aa, Gossypium hirsutum
  Clone ID: uC-gsflnu33B133f11b1.pep
MLSPQLILWAARKTRVMSSPENCCLFLLLNHHICQKQPPFFSKYFRTRE

SEQ ID NO: 115525 - protein, 37 aa, Gossypium hirsutum
  Clone ID: uC-gsflnu33B134d07b1.pep
THVSHISTSSPYIFNLPYHLQSYLSIPPIITHACTDA

SEQ ID NO: 115526 - protein, 34 aa, Gossypium hirsutum
  Clone ID: uC-gsflnu33B135h03b1.pep
HQTPEPPYRAAAWTINRPSFRRPQINRTRGRKQK

SEQ ID NO: 115527 - protein, 68 aa, Gossypium hirsutum
  Clone ID: uC-gsflnu33B139d05b1.pep
EMTSPSSGSFSHPLWRSSLFLYCGYNARLWSISTQLCIGPACRRYRTLGLNPPVKKTPPPPTSGSPEK

SEQ ID NO: 115528 - protein, 43 aa, Gossypium hirsutum
  Clone ID: uC-gsflnu33B139e11b1.pep
ILPIFSKSSQLCLRHYCFRFSPFGLNQPLSYLNPPLSLCFPYA

SEQ ID NO: 115529 - protein, 80 aa, Gossypium hirsutum
  Clone ID: uC-gsflnu33B139f08b1.pep
SPLPLCNFMFIVEIIALAYFSFPDFTREVYSSFAMRIIQPYCPSPARSLYVTTCCRYAPFGLNTPLISKNPPPTFGSPDA

SEQ ID NO: 115530 - protein, 65 aa, Gossypium hirsutum
  Clone ID: uC-gsflnu33B141d02b1.pep
VIRRRIEGSTGIFLLLVLSNSTGHPMSDYMRRILWLMYKFSVLSMNHEHVQNYMTTCRAGEHCQN

SEQ ID NO: 115531 - protein, 78 aa, Gossypium hirsutum
  unsure (1)..(78): unsure at all Xaa locations
  Clone ID: uC-gsflnu33B143f01b1.pep
RHGGQAAGRIGKELXTESTAHTEENFRTLCTGXKGVRRMSMPLYYKSYSCHGGSDNYMCQGGDLTDGNRTRRESTDRS

SEQ ID NO: 115532 - protein, 92 aa, Gossypium hirsutum
  Clone ID: uC-gsflnu33B145h04b1.pep
NIHKVMDIINRSCKLRCIDISRSLFFTDANTSRVGRSLARLNLTPPNNNRMRLRLCRLFNASACFLLFHSLHLLLLPILHHINLSTARRKRE

SEQ ID NO: 115533 - protein, 44 aa, Gossypium hirsutum
  Clone ID: uC-gsronu33B157g04b1.pep
LLLSSLRTIRSSVCLVVSLCEYPRACVSPGILRRCPHGRHRLSL

SEQ ID NO: 115534 - protein, 91 aa, Gossypium hirsutum
  Clone ID: uC-gsronu33B164a10b2.pep
KPPPIPPFLSKHKTPPPPSKTVQQNFLSPSPYYISFLHDASSYPPSSYPYTLESFLFPPTLPLNLHLPSLLLLSLSSLSFPLISLLPLLPP

SEQ ID NO: 115535 - protein, 144 aa, Gossypium hirsutum
  Clone ID: uC-gsronu33B167c06b1.pep
FKNTQSHTLKKKNTNIAPSLPPNLGPPVLWVPSFLPLPCTFISLLWPPLILFSCPSFPPPGPGKPFVSPTLSPLHLLLLSPPCLLPKSPPPTPFPTSCPSCLSNGPPPLSPLSPRRFWWFPPIGPVPFSSAFPPFFCFSPLFSP

SEQ ID NO: 115536 - protein, 86 aa, Gossypium hirsutum
  Clone ID: uC-gsronu33B170g04b1.pep
RSVWRLFAVTPSAPWGMFCPVITLGYASVFPVPTLFCVGPLLVFWFPYSLSYAVAFTRGLRWVIRPARFKSPPPCVLVRVGGPRSP

SEQ ID NO: 115537 - protein, 141 aa, Gossypium hirsutum
  unsure (1)..(141): unsure at all Xaa locations
  Clone ID: uC-gsronu33B171g07b1.pep
GPSPVIPGPGEKPMIVVQHKGEEKQVAAPEIFSMVLIKMLEXLEVYLVSTIKNAVVTVPAYFNYSQRQATKDAGVIAGLNVLRIIXNEPTVVAIAYGLDKKATSVGEKNVLIFDLGGGTIDSFLLTIEEGFIEVKATLATS

SEQ ID NO: 115538 - protein, 46 aa, Gossypium hirsutum
  Clone ID: uC-gsronu33B171h04b1.pep
IRLDRLVSLSTFFSLFSPQIFIHSDLKNVSRHSIAKRALSAFCLLI

SEQ ID NO: 115539 - protein, 122 aa, Gossypium hirsutum
  Clone ID: uC-gsronu33b023h04b1.pep
KKQKANNVGGKEEIKVLHQPKASRVSPFSVISRSSSFDSLISGSSSSGEGSKGTNDAYVFDIPSYWSDFAADTNLEFPDAEAFSDATPVGDSNLLDHIFEEYQKLFDRDDPGGRESIFDVLS

SEQ ID NO: 115540 - protein, 124 aa, Gossypium hirsutum
  unsure (1)..(124): unsure at all Xaa locations
  Clone ID: uC-gsronu33b112a08b1.pep
ENYRVPGMVNQASDWPLLSPPVMPLTSTNQDLYLRDQDSIRNILVKLGGRFSDDHPQSSTISTTTNPMNFRYPFDVYFSQDHQLYEDSMNILSSASSISPLNSTCSQTNSTTIXSVTGWVVLMI

SEQ ID NO: 115541 - protein, 114 aa, Gossypium hirsutum
  unsure (1)..(114): unsure at all Xaa locations
  Clone ID: uC-gsronu33b112b05b1.pep
APHLLQDMYSEFVAKLVFINVPXWNLALNMMISPWLTQRTNNMFVCARPGNSSDILXRYIAPEQVPRQXGGLSKVGVQDFTVADAATDVTIKPATKHSAELPVTEKSTVMSQVL

SEQ ID NO: 115542 - protein, 72 aa, Gossypium hirsutum
  unsure (1)..(72): unsure at all Xaa locations
  Clone ID: uC-gsflmaxxa004b02b1.pep
KKRKEEEEEIKIKRKKKKKKINKKERKSEEKNNRKRKNKKXKQEKKPTQKNRTRLMDTRELSKRSRQLSNHK

SEQ ID NO: 115543 - protein, 86 aa, Gossypium hirsutum
  Clone ID: uC-gsflmaxxa045d07b1.pep
CPCCCRRGIIAGTTPSVFHACDHPYGGVGLSEPNSDGAMRHERRAHESANEQWTFYGECPFYNGCSLTFEGSCGCKYLDISCVLKL

SEQ ID NO: 115544 - protein, 25 aa, Gossypium hirsutum
  Clone ID: uC-gsflmaxxa058g01b1.pep
IIGSTSGWVQITSDKDIKTRCGEHL

SEQ ID NO: 115545 - protein, 70 aa, Gossypium hirsutum
  Clone ID: uC-gsflmaxxa090g11b1.pep
FSKRVIKPAGLCILPRVRLFVDTFRYRVRWSYHRLHLRSPLLQISPSSSIFSVRVRVLRVPVFFYAHVLL

SEQ ID NO: 115546 - protein, 37 aa, Gossypium hirsutum
  Clone ID: uC-gsflmaxxa095c05b1.pep
HATETLFPTLKPWTLLDSLWGTPPRILLDSILNDLNL

SEQ ID NO: 115547 - protein, 46 aa, Gossypium hirsutum
  Clone ID: uC-gsronu33B018g10b1.pep
LSSTIQNLHALKAMLHATLGSSRRSLPLVFLDPLSVVVLYFFSLFS

SEQ ID NO: 115548 - protein, 66 aa, Gossypium hirsutum
  Clone ID: uC-gsronu33B037d01b1.pep
ITHHQNNHGGDQINQEWRSYIQRRQSRQPKSMPKPEQIINSKHVHRTKPCVTRANEEARTKTRSIS

SEQ ID NO: 115549 - protein, 71 aa, Gossypium hirsutum
  Clone ID: uC-gsronu33B139b06b1.pep
FHSDLGRPAADYGGVSGDGSKLLVCAGNDDARKGVCDRGLTLDKIKACGGDESANRLKPFYKGEPITVTIP

SEQ ID NO: 115550 - protein, 58 aa, Gossypium hirsutum
  Clone ID: uC-gsronu33B167d08b1.pep
FIRELCPSFKHNAKIYELIHGINFRLCVKLSLFFSYNLLQFHIHRCRLMLKINSMVLV

SEQ ID NO: 115551 - protein, 135 aa, Gossypium hirsutum
  Clone ID: uC-gsronu33b025c06b1.pep
LSRPPTRTAIGGLIGLVCSGTVLAQENSIGCLCNLVSNDSKLKLLIVKENGIDCLKNFLDSSPNPKSLEVAIEFIRHLASFPPIAEALVADGFIARLVSALNCGVLNVRIAAAKAVYELGFFVKTRKEMGECGCI

SEQ ID NO: 115552 - protein, 46 aa, Gossypium hirsutum
  Clone ID: uC-gsflnu33B002b08b1.pep
LTITWTQFAPLGFSSLPHVYIYLSLCRSTSLLLKNTILWRPLSICI

SEQ ID NO: 115553 - protein, 55 aa, Gossypium hirsutum
  Clone ID: uC-gsflnu33B024a04b1.pep
YIGTEVSSATQLVTFIRKILSRPSCYLPSNQTVPSELAHLEQISQILCKLHEPPT

SEQ ID NO: 115554 - protein, 99 aa, Gossypium hirsutum
  Clone ID: uC-gsflnu33B035c06b1.pep
DMIGARINGSPSFCKRSEALGPKSPTLYLSGPLTGSSHSILFICVSSALNWLGIGSGPKAVVELLLWVPLELLSASTGTPCLGALDSVAGVRTRGRKQE

SEQ ID NO: 115555 - protein, 120 aa, Gossypium hirsutum
  unsure (1)..(120): unsure at all Xaa locations
  Clone ID: uC-gsflnu33B071f07b1.pep
MMPGKESPVDASRGDQGKGFYTRSGRRYDTANDEVATAHRSETREKKGLMDWIKDKLPXQHRIDEEDTTQPPDDVVLIENDHHEGETRQKKGLLVRIKEKIPGYHSNTEDETGKETTALN

SEQ ID NO: 115556 - protein, 60 aa, Gossypium hirsutum
  Clone ID: uC-gsflnu33B079h09b1.pep
ACLAGIDLWRILLRIYRELTVTMNVINDVVRSFVANHLTGRVRNATMGKYPVNGKRQGGC

SEQ ID NO: 115557 - protein, 102 aa, Gossypium hirsutum
  unsure (1)..(102): unsure at all Xaa locations
  Clone ID: uC-gsflnu33B088f04b1.pep
MISILAEASDRFNINCQIEHLLAKHCGTGHAELNRLEWAGNIERYRYASYIGPYPTVAYSAGAKKESMGRESYICMQKRLTPXGLPTEREHDYELLVGLPSV

SEQ ID NO: 115558 - protein, 43 aa, Gossypium hirsutum
  Clone ID: uC-gsflnu33B094h03b1.pep
FLPFISEILTSYMTCSPSFALGVEFSAFSQLPLLEVLSTVPWH

SEQ ID NO: 115559 - protein, 116 aa, Gossypium hirsutum
  Clone ID: uC-gsflnu33B112e03b1.pep
PCHSRHLGTCKQLLECKSAPNLPSCLHIIVITYSAAAPSANGLIPLSICHMPRFLSPASQSSTFPLHSIRDLHVVDIVLQYLISCNQLLMILHIGCGSLYFVTHVSNCPFIESCKI

SEQ ID NO: 115560 - protein, 144 aa, Gossypium hirsutum
  unsure (1)..(144): unsure at all Xaa locations
  Clone ID: uC-gsronu33B057f05b1.pep
MAEEHRCQTPEGHRLCVNNCGFFGSPATMNLCSKCYRDFRLKEQQGATSIKSSFSSSPSSSSVVAESVSQVPLFTLPEFIGESSVSFVEVALVAEQRAEQATTDXCMVCRKTVGLTRVRCKCEITFCGXHRYPEKYGCTFDFRR

SEQ ID NO: 115561 - protein, 144 aa, Gossypium hirsutum
  unsure (1)..(144): unsure at all Xaa locations
  Clone ID: uC-gsronu33B057g04b1.pep
FLHLSLAKVIRAGFKSNGGXLSLSVMEQMPLMKSVVYESFRIDPPVQVQYGKAKKDLLIESHHAVYEVKEGEMLFGYQPFATKDPNIFDRAQEFXPDRLMGVDXEKLFEYVLWSNGPXETEHPTVADXQCARKEFAMMVSKLFV

SEQ ID NO: 115562 - protein, 65 aa, Gossypium hirsutum
  Clone ID: uC-gsronu33B057h02b1.pep
FHYKAMKVGDLGGFYYKGATDRRDVGVGSVVKEWNAAEGGDKNSEEVVDVKAVGEMRRRVELNDM

SEQ ID NO: 115563 - protein, 113 aa, Gossypium hirsutum
  Clone ID: uC-gsronu33B057h06b1.pep
FITDKVMALINVALLCTNPTSSTRPVMTPGESMLAGMADVQEYLTESSISSNRQMRAEIMKQLSRKLEEDDTHASQTRSIEADGPWTNTSTYGADLYPAGSTSGYWQNRESTN

SEQ ID NO: 115564 - protein, 125 aa, Gossypium hirsutum
  unsure (1)..(125): unsure at all Xaa locations
  Clone ID: uC-gsronu33B057h10b1.pep
HASGLSYSSPRAVCALGLLMPTISFLLSIILRTARLDWRSTSSQAKMIGTFISIAGAIFAELYKGPFTRPSPVSLDHHLQVIPKLFGFYSTPDRXALGGIMLAAATLSISAWNIVQVQGFGPQID

SEQ ID NO: 115565 - protein, 84 aa, Gossypium hirsutum
  unsure (1)..(84): unsure at all Xaa locations
  Clone ID: uC-gsronu33B072c10b1.pep
TFKDFPASSLAFIDTLLAIDPAERLTATSALRSEFFMTEPYACEPSSLPKYPPSKEMDAKRRDDEARRLRAAXKAQGAGARKIM

SEQ ID NO: 115566 - protein, 107 aa, Gossypium hirsutum
  Clone ID: uC-gsronu33B074a04b1.pep
DGKKEKKREEALMAGSTILSRLSSSRLKALPVKLKSSKPVLPTISPLKSSSQSQFSSASSSSSSSSSSSLKRISGIPRLPVELSCLISMMPLHSAVVFVCLRSLLAL

SEQ ID NO: 115567 - protein, 61 aa, Gossypium hirsutum
  Clone ID: uC-gsronu33B074a06b1.pep
MATPSSIPLAFTVRRCKPELVAPAKPTPHEQKLLSDIDDQKSLQVQFPAVQLYRFQPYMEW

SEQ ID NO: 115568 - protein, 150 aa, Gossypium hirsutum
  Clone ID: uC-gsronu33B074a08b1.pep
YYFLFLLLSFIIFFYLLFFLSYFFIFSFFLYLLFFIFIFYSLYFFIFIFYFSFILYSFLFYSYLNFLFLFFFFFYFFFFIIILFNIIFICNFFLILFSFYIFSFTLSYHFLFSIKYFYLSIIFFLFFINFFLFFYLFIFFSLFYSFIFFY

SEQ ID NO: 115569 - protein, 86 aa, Gossypium hirsutum
  Clone ID: uC-gsronu33B082c07b1.pep
NCRCKTWEGLCKLNKIQLILLLTVVPDLQTRYDQGNLNDKSLKLLIHMIFEFVIYKVSLKKSISSAVGAKVFASKFGVDQPSAFAV

SEQ ID NO: 115570 - protein, 67 aa, Gossypium hirsutum
  Clone ID: uC-gsronu33B082c11b1.pep
RAAQGQTDALHLLGAHVVALHDHHAAVLLQQGAQLQGVLTLLVRDGHGRTARGGWTSRLSHKGSRPT

SEQ ID NO: 115571 - protein, 166 aa, Gossypium hirsutum
  Clone ID: uC-gsronu33B082f04b1.pep
PNPFITTAELSRLMQWKLTRGKWRPRLLDFVSSLDDSSVQSVSQKAFLSLPDISKAISELTVLKGVGAATASAVLAAYAPETAPFMSDEAMLAALGSSKDYSLKQYLLFVEKLKSKSKELSSMGDSFRPSDVERALWSSAVGVKLQSSQTAPDKKIKGSNTRQRKH

SEQ ID NO: 115572 - protein, 80 aa, Gossypium hirsutum
  Clone ID: uC-gsronu33B082f11b1.pep
KKMEEIRYGAIERLATQNSLGDLFMSVVRRSAEAAEPLHLLPSAYLTVNLTPSEDFKQAHGIQQWWRPDLHLKCNLYKYK

SEQ ID NO: 115573 - protein, 105 aa, Gossypium hirsutum
  Clone ID: uC-gsronu33B082h12b1.pep
RSEHQKATATGFGESLLPTKARTTARTSEIPWKRILASRPVWAIVVNNFTFHYALYVLMNWLPTYFELGLQLSLQEMGSSKMLPYFNMFIFSNIGGALADHLFTI

SEQ ID NO: 115574 - protein, 95 aa, Gossypium hirsutum
  Clone ID: uC-gsronu33B086a10b1.pep
VCEFRSPTLKSSPSFDCNESSEDSKEPTLCYLCAGNLFCKYARHRETVRGDVSWLVTYCLWRPSFIMFFYYLFLSYFFSIFFISFIFLIFSINFS

SEQ ID NO: 115575 - protein, 48 aa, Gossypium hirsutum
  Clone ID: uC-gsronu33B086f12b1.pep
VNRTKWPKLSLLMFFRKAKRKALTSNKNASSPSLGHASRFKRSMPGAK

SEQ ID NO: 115576 - protein, 68 aa, Gossypium hirsutum
  Clone ID: uC-gsronu33B086h10b1.pep
ISFVGTHEYLAPEIIKGQGHGSAVDWWTFGIFLYELLFGKTPFMVVFILATVFNLIVQSLRFSVFLFF

SEQ ID NO: 115577 - protein, 92 aa, Gossypium hirsutum
  unsure (1)..(92): unsure at all Xaa locations
  Clone ID: uC-gsronu33B099a08b1.pep
LLLVHNKPLLRLKTERQRREKLNQRFYALRAVSAQXISKMDKAWGVGDAGANITDLEVQLKVLDLGTEKLVSSPRDSTGLDGNTKAEPNIGA

SEQ ID NO: 115578 - protein, 49 aa, Gossypium hirsutum
  Clone ID: uC-gsronu33B099a11b1.pep
DSFYSPYYMYYSLPLPYGVTPVYISTSSKITCLPNYCSLLPMCCHDSLY

SEQ ID NO: 115579 - protein, 49 aa, Gossypium hirsutum
  unsure (1)..(49): unsure at all Xaa locations
  Clone ID: uC-gsronu33B100c05b1.pep
IISGEDTRTTLMIKNIPNKYTSKMLLAAIDENHQGTYXNFLYMPIDFQN

SEQ ID NO: 115580 - protein, 85 aa, Gossypium hirsutum
  unsure (1)..(85): unsure at all Xaa locations
  Clone ID: uC-gsronu33B100h12b1.pep
ERLNGHYGVGAFVIGNTISSIPYLCFISLIPGALAYYLVGLQKSSDHFIYFVXLLFTSTMLVESIMMTVASVVPIYFMGIISGVG

SEQ ID NO: 115581 - protein, 71 aa, Gossypium hirsutum
  Clone ID: uC-gsronu33B101a03b1.pep
SVLNRDLSEKELQMKTRREIMVLGAQLGKTNIAAWASKEEEDKDASTSLKIVAPEQPSKSVIETRAALWEE

SEQ ID NO: 115582 - protein, 78 aa, Gossypium hirsutum
  Clone ID: uC-gsronu33B101b01b1.pep
RLRARSPCASLHVRTRAMRCSFSTTPQPELHRARTTGRPCFDCRSRSRWQLKAWGISLSAGNKGKQRKFFSSRFFSDE

SEQ ID NO: 115583 - protein, 61 aa, Gossypium hirsutum
  Clone ID: uC-gsronu33B101f09b1.pep
KGRGEKRKKDNEDLTMAKHQQTTNRTEKNKGFYMYNRSLFHLLNNFEIQRRDKARTWSSWC

SEQ ID NO: 115584 - protein, 127 aa, Gossypium hirsutum
  Clone ID: uC-gsronu33B103a02b1.pep
MAQLKKMDCEIVIKTPADKFYNTFRTKSHLIPKMSNGLMIDGKLLQGDWNTVGCVRLWSYVSEGKSEMVKEILENVDDENKTMVFKVAEGQILNYYKSWRSIFNITPMGEGSSAKWTMEFDKQIEII

SEQ ID NO: 115585 - protein, 111 aa, Gossypium hirsutum
  Clone ID: uC-gsronu33B103d07b1.pep
VDIGPFPYQKPATNVNMMNVPGAYVMNPCNVQCNDQMYCLHPGVENKTGEAAALNGQGFNGCDFDNIQCLANQNSTGGIGSAGSNGNYSGTKRRKGKSLGVFLLIFLHNLC

SEQ ID NO: 115586 - protein, 73 aa, Gossypium hirsutum
  Clone ID: uC-gsronu33B103h01b1.pep
GSKLKPSAAKGNGKSQVQNHDDIFAKSIHETRRQITSPEPDNGEISQKVGGHGHGHGSGRKDHQFSDTISRLK

SEQ ID NO: 115587 - protein, 134 aa, Gossypium hirsutum
  Clone ID: uC-gsronu33B124a03b1.pep
MSNIRLVEAKLPTGFRFHPRDEELVCDYLMRKVALTDTFQLMIEVDLNKCEPWDIPETARVNSKEWYFYSQRDRKYATGLRTNRATTSGYWKATGKDKAVHSKGTIVGMRKTLVFYHGRAPSGTKSDWVMHEFK

SEQ ID NO: 115588 - protein, 67 aa, Gossypium hirsutum
  Clone ID: uC-gsronu33B124b04b1.pep
KKKLKICHPPGGKLGPLKRAPPIGFLLLSALVKIFFFFLIFVYFFFFFFFLFFFFFFFFFFFFFFFK

SEQ ID NO: 115589 - protein, 105 aa, Gossypium hirsutum
  Clone ID: uC-gsronu33B125b03b1.pep
MLQKLLTQMLKPASEAEGSGISPEKKVRKMRASPFNMKSGSVLGKTSGSSLSSMPEIDSDEDEEVAVVVEPRARPQRANRTKTTYVVSDSETEEEVNDDSDFEED

SEQ ID NO: 115590 - protein, 114 aa, Gossypium hirsutum
  unsure (1)..(114): unsure at all Xaa locations
  Clone ID: uC-gsronu33B125b05b1.pep
MTSEFSLQAGKTVITTIHQPSSRLFHKFDKLVLLGKGSSLYFGRASEAMAYFSSIGCSPLIAMNPAEFLLDLANGNINDISVPSXLEDKVQMGNSETATRNEKPPPAVVHQVKF

SEQ ID NO: 115591 - protein, 172 aa, Gossypium hirsutum
  unsure (1)..(172): unsure at all Xaa locations
  Clone ID: uC-gsronu33B125d03b1.pep
LLLTYLLGVVLGVTALATPYVATYDGTNYGKANTPANETPKVNAPPHEHYPPVYEPTMKDKPAPNPPAYTPPTKEKPEPKAPAYEAPPKAKPEPNPPAYTPTMEEKLAHNPPVYEPPTKDKPAPNPPAYTPPPKDKPEPNQPVYQPPKRHXVYEPTPLNAPAYVPPQKEIPG

SEQ ID NO: 115592 - protein, 158 aa, Gossypium hirsutum
  unsure (1)..(158): unsure at all Xaa locations
  Clone ID: uC-gsflmaxxa002b04b1.pep
ENMSRKRDKPYFSRHAPASISKRRRPLPPHPPPLPSSENEAKPKSPPAVIVMGLPPNCSVLDLKSRFEIYGSISRIRINCDAVGYIVYRTKESAESAIAASLDSSFGIXLIPKGFKVLWAPDPLAQWRDRIGLNAYTHYGASFLSRILGLRCLLLVFV

SEQ ID NO: 115593 - protein, 148 aa, Gossypium hirsutum
  unsure (1)..(148): unsure at all Xaa locations
  Clone ID: uC-gsflmaxxa002e12b1.pep
GRVGLYKPNLWGPNGLGKQSLYNVSITVDVKGYGESDTWGHLFGIRKIESHIDSATGGRLFKVNGQPIFIRGGNWILSDCLLRLSKERFKTDIKFHADMNLNMIRCWGGGLAERPDFYHYXDVXGVVVWQEFWITGDVDGRSIPVSNP

SEQ ID NO: 115594 - protein, 76 aa, Gossypium hirsutum
  Clone ID: uC-gsflmaxxa002f09b1.pep
SKRVEGERILFWKIEIEGLGEKIREMAGEKRRFAIGYALLPKKENSFIRESLVNLAKSRGVDLVKIDRERSLVDQG

SEQ ID NO: 115595 - protein, 112 aa, Gossypium hirsutum
  unsure (1)..(112): unsure at all Xaa locations
  Clone ID: uC-gsflmaxxa002g03b1.pep
MVLVSAVRDYVYRMLQDISGMKVLILDSQTVSIVSVGYSQSELLQKEVFLVELIDSISKSKESMSHLXAAYFLWPTSENIQYLPRQLSNSKFGECHLVFSDMMKDTQIHLLA

SEQ ID NO: 115596 - protein, 68 aa, Gossypium hirsutum
  Clone ID: uC-gsflmaxxa003c10b1.pep
RNDRSRKGCRTSKKDPIPATGGLGFDRRGKTCLDDSLFQELSFASSILVLFLSLLTWSSFFFLFLLFF

SEQ ID NO: 115597 - protein, 117 aa, Gossypium hirsutum
  Clone ID: uC-gsflmaxxa003d11b1.pep
MVDQGAVCCMCGDVGFSDKIFRCNKCRHRFQHSYCSNYYSEFAEPIELCDWCRSEERNSKHGSSLKKSPLMNRNETGIVNRSEYSGDKLKQHNDDHQHEHHHRGKNGGTPSPRPTTR

SEQ ID NO: 115598 - protein, 147 aa, Gossypium hirsutum
  unsure (1)..(147): unsure at all Xaa locations
  Clone ID: uC-gsflmaxxa003e06b1.pep
MGQSTDLRVPMDQIQNQEQDKVNLHNQGIDDAILMATPKGENIRRPRGRPAGSKNKPKPPIIVTRDSANALRAHAMEVTSGCDVHESLASFARRKQRGICVLSGSGXVTNVTLKQPSLSGAIVTLHGRYETLSLLGSILPPPAPPGI

SEQ ID NO: 115599 - protein, 44 aa, Gossypium hirsutum
  Clone ID: uC-gsflmaxxa004d06b1.pep
VRLGWRIQKHDEAAMEQLCEETGVQRQVLKVWMHNNKCTLGKKP

SEQ ID NO: 115600 - protein, 128 aa, Gossypium hirsutum
  unsure (1)..(128): unsure at all Xaa locations
  Clone ID: uC-gsflmaxxa004e04b1.pep
METSSVSKLLIFFFTAFLASSKLIQCSITYDKKAILINGQRRILISGSIHYPRSTPEMWXDLIKQAKDGGLDVIDTYVFWNGHEPSPGNYNFEGRYDLVRFIKTVQKLGLLCHLRIGPYICAEWNFGG

SEQ ID NO: 115601 - protein, 68 aa, Gossypium hirsutum
  Clone ID: uC-gsflmaxxa004g04b1.pep
PKGNQEENDDLTTKQKRKRKRKTKKEGKRKEKESTRKDHRVREGSSAINGLKFKSDFLWWRKEEKRDI

SEQ ID NO: 115602 - protein, 175 aa, Gossypium hirsutum
  Clone ID: uC-gsflmaxxa004g10b1.pep
KTHEGKTQSVREISRFISSTLKEMDDLEGSGLPRNAEITTWVPLSGTAIKINFDGAFDRQRSRTAFGVVARNGEGRVLIARSKLHENVGSAFAAESLACLCAIQTVIEMGLETIIEGDALSIVKKCQNHVMDKSEIAAYIRNIHLTAEHSPWIHFRHIKKEANRLVHPTRPPTRK

SEQ ID NO: 115603 - protein, 122 aa, Gossypium hirsutum
  Clone ID: uC-gsflmaxxa005a01b1.pep
TKNPTFETEHSKMVTGWRRAFCTSIPKKQDSPVLPEKQQQEESHGTKSPRFSSKFGFFSNPSTPRLRSQPGSSPSLRCRTVSTATSSLPNSPKLHFRTPHLSTPSSPKSPSSFSFLKSTLCI

SEQ ID NO: 115604 - protein, 64 aa, Gossypium hirsutum
  Clone ID: uC-gsflmaxxa005a04b1.pep
NSCLFYECLHAWQAVVSLSFYYVCCFVLAFSMLLALQSSKFPFLLKMAIGYLPSRIKLILWIYL

SEQ ID NO: 115605 - protein, 68 aa, Gossypium hirsutum
  Clone ID: uC-gsflmaxxa005a07b1.pep
LPLLTCIKLSLFSVIKQKCKKKKKAKRKSTTYHQKKKKKDTNLNQEKNPNTKAPPRLLLLHTSQKLPG

SEQ ID NO: 115606 - protein, 137 aa, Gossypium hirsutum
  unsure (1)..(137): unsure at all Xaa locations
  Clone ID: uC-gsflmaxxa006b06b1.pep
MDFDEYEYLEKTVENPEHQKVKKEDGNGRVDNVKSEEKIRSGSSKHKREERVDDYDDYRSHSKRSKSREEXLYDHDRHKERGSCRHRSRSRDGEKDRHRSSREDRVKDRDKGERXGENKEQERERDRKEHDRERERG

SEQ ID NO: 115607 - protein, 94 aa, Gossypium hirsutum
  Clone ID: uC-gsflmaxxa006d04b1.pep
MGSHLNFKDFGDASSMEGNESKPLGNFPLTRQSSIYSLTFDELQNTFGGIGKDFGSMNMDELLKNISTAEETQAFMTASVSGGEGSLSGGNLQR

SEQ ID NO: 115608 - protein, 71 aa, Gossypium hirsutum
  Clone ID: uC-gsflmaxxa006d10b1.pep
HASEKNFMALQFNFISSMLIILLLTISSAKAQEAGGVGGRGGGDGGALAAGVEINFDSCCSKQEMGSHLNF

SEQ ID NO: 115609 - protein, 63 aa, Gossypium hirsutum
  Clone ID: uC-gsflmaxxa006e07b1.pep
IVTASNSPSQFPSSSNPIVTLSFSWRFEIKDFNRVILIPICKRKRNQVLGCVAEWQDLRVGFR

SEQ ID NO: 115610 - protein, 98 aa, Gossypium hirsutum
  Clone ID: uC-gsflmaxxa006f10b1.pep
RPRVRPADTEKKVNNQTDSSFFLTSVMASSISIIPSYFASTSLPPLPIASHFPFNLNSLTFFFPLKNGSFKLRNAPPLSPKALSSRAPKAAVVSKAHR

SEQ ID NO: 115611 - protein, 83 aa, Gossypium hirsutum
  Clone ID: uC-gsflmaxxa006h04b1.pep
LLHSHQWLLMKLKNRIPEYVQSTVKARKTMCLNGHRDRHQLRRSETSNAFEERGLACKKELAVELGVAVDAWLRAGRREGAAS

SEQ ID NO: 115612 - protein, 154 aa, Gossypium hirsutum
  unsure (1)..(154): unsure at all Xaa locations
  Clone ID: uC-gsflmaxxa009a01b1.pep
REATPIMVTALDIFLCLQHEGDCSIREAWYHLSDEYPIKYEAERLPPPLVADLNGDGKKEILVATHDAKIQVLEPHARRVDEGFSEAPLLAEVSLLPDKIKVASGRRPVAMATGVIDRIYXSGQPQKQVLVVVTSGWSCMCFDHNLTKLWENNL

SEQ ID NO: 115613 - protein, 100 aa, Gossypium hirsutum
  Clone ID: uC-gsflmaxxa009a07b1.pep
HIYQPGHLLVCQGEYLLRISQQIGTPTAALILLFELLFLRLPNEMSKIWSTRLVTTIARISHSFHNFNNEGGNTLIIFRLFLTKIKLPTIVGIIVIVNAS

SEQ ID NO: 115614 - protein, 46 aa, Gossypium hirsutum
  Clone ID: uC-gsflmaxxa009e04b1.pep
NYKLEKKYKNIKIIIFKFLKKYIRSLISLKFYKSHLLELEHEIVVA

SEQ ID NO: 115615 - protein, 162 aa, Gossypium hirsutum
  Clone ID: uC-gsflmaxxa009g05b1.pep
FKEALAVGYGTEGGVDYFLVRNSWGPNWGENGYIKMERNVAGTSTGKCGIAMMASYPIKKGPNPPKPAPSPPSPVKPPTVCNEYYSCPQGSTCCCLYEYGKYCLGWGCCPMESATCCDDHYSCCPHEYPVCDLTAGTCRMMQDSPLGVKLLKRGPAKLITKQ

SEQ ID NO: 115616 - protein, 61 aa, Gossypium hirsutum
  unsure (1)..(61): unsure at all Xaa locations
  Clone ID: uC-gsflmaxxa009h02b1.pep
NFKGLNSEIKYKYIFSASFMHAGSQTAGGSLVKACGSLGAIKQDHEPKKMDLDRXKIKIIE

SEQ ID NO: 115617 - protein, 116 aa, Gossypium hirsutum
  Clone ID: uC-gsflmaxxa009h10b1.pep
MQKSCRFISRFLRSSKHTSSPIIVNSSFNNLSHFDFLNPRNQSFFQFSPHTTNSGQARGLKRCVLLGFVLTADDPIYYQHHTHFYSLRRKFFTRAKQIKKIEINDQHSQRAVTTAL

SEQ ID NO: 115618 - protein, 67 aa, Gossypium hirsutum
  Clone ID: uC-gsflmaxxa010a11b1.pep
KFQLHIFAVAGRTSKNMSLGNLASAVGNVVGDITGLSKPSKNTITGSVVIVKKNVLDFTAVHSTVSC

SEQ ID NO: 115619 - protein, 121 aa, Gossypium hirsutum
  unsure (1)..(121): unsure at all Xaa locations
  Clone ID: uC-gsflmaxxa010d10b1.pep
MPISRFIFFSAKHRFAHASNLLPRFGSSKRIQSCGYTKSAKNNYYKKPTGHPVGNVETQASRSSGAYIIPPILLGFXGLLAFLHYNDERRAVKIGKDSYTGSDTAAASIIGGPFTLVIFGK

SEQ ID NO: 115620 - protein, 106 aa, Gossypium hirsutum
  Clone ID: uC-gsflmaxxa012b04b1.pep
PSVPRSPGGAENPVNPGSRWKKGKLLGRGTFGHVYVGFNSESGEMCAMKEVTLFSDDAKSNESTKQLMQEIALLSRLWHPNIVQYYGSEKVDDRLYIYLEYVSGAS

SEQ ID NO: 115621 - protein, 76 aa, Gossypium hirsutum
  Clone ID: uC-gsflmaxxa012d08b1.pep
RRGEEGEDRGGRDRSQRNLLNAHQLSAITSIAHISKNQSLIINKTSLTKPIKEPKNRSSNNLNEKNDSNQKKEMKN

SEQ ID NO: 115622 - protein, 92 aa, Gossypium hirsutum
  Clone ID: uC-gsflmaxxa014c07b1.pep
SLTRGNPSCPVLWCCNIIIVMSSDIECVWVFALASNCRAFSRESTAWSTLIIALAWPLMIFLSWAHPCCPVRSFFRVYHFLPSFLPTLPLFS

SEQ ID NO: 115623 - protein, 84 aa, Gossypium hirsutum
  Clone ID: uC-gsflmaxxa015a04b1.pep
QPLPPTIIPYSNVHISSQSQPSNFHCRSQSQNLNPLPVKIILLKTHYTKFDYTGLDTVALIHNFQISHRATKTEKKGKSQLVHF

SEQ ID NO: 115624 - protein, 166 aa, Gossypium hirsutum
  unsure (1)..(166): unsure at all Xaa locations
  Clone ID: uC-gsflmaxxa015a08b1.pep
LLTRTVDSGIPGMAIETAFPGPTAKSATGDTRMSPPARXVKGKLNXLQQTLSEDILSGTSSKNILAXTFKQEVLQQXWSFELILFRPGTERDMEDLENPREVPASFTLRSSEERVISVLGEVACISGLQSTGKHFLENLLGKTPSNFXRWVRKSKGIDSKIICFLH

SEQ ID NO: 115625 - protein, 44 aa, Gossypium hirsutum
  Clone ID: uC-gsflmaxxa015c10b1.pep
DFKQDQVAFPAPSRILLKLSDYSPALDLNSQRSIFSLLRRQPLL

SEQ ID NO: 115626 - protein, 66 aa, Gossypium hirsutum
  Clone ID: uC-gsflmaxxa026a05b1.pep
RSLRGTPQHNFLDRLFAKFIDFNIIQFASPRRKLQHLLGTTPPLEGHFYPHLSLLYLDHRRNQKQE

SEQ ID NO: 115627 - protein, 86 aa, Gossypium hirsutum
  Clone ID: uC-gsflmaxxa026a10b1.pep
FSFNLFYQWRLTLPCDKTSIDGSRTPLVQNLDSDFSSGYLEDALLEFTEMSKRRRLLSLHGDDYDDDDLTNSFKDLALNYLNSENL

SEQ ID NO: 115628 - protein, 140 aa, Gossypium hirsutum
  unsure (1)..(140): unsure at all Xaa locations
  Clone ID: uC-gsflmaxxa026c01b1.pep
MVEIGNYDSFYEAGVIFSPEQILKLTKETRGNLPSITLSVTVPHTLSLPDQVKLAEMLEKEGVDVIQTEGGKCSTPSKSGVLGLIEKATPTLAAAYSISRAVKIPVMCSSGLSAVTAPMAITAXAAGVGVGSSMNKLNDV

SEQ ID NO: 115629 - protein, 93 aa, Gossypium hirsutum
  unsure (1)..(93): unsure at all Xaa locations
  Clone ID: uC-gsflmaxxa026d12b1.pep
MAFVGRHRWVEYAKKDRYDASQVPPEWQGWLHFITDHTGDELLMLKPKRYGXEHKENLSGKGSEFIYHSKGHALNPCQREWTRYQSWQPTKPE

SEQ ID NO: 115630 - protein, 168 aa, Gossypium hirsutum
  Clone ID: uC-gsflmaxxa026g02b1.pep
PLVRRKVFEALDTLGSTKWRVNNKVLAVVESIWASGGNIAGLVDRNDIPIPEKPYSEDSTEIQEWKWSVRKANKVNRERHSQRCDTELKLSVARKMENEEGFYYPHNLDFRGRAYPMHPHLNHLSSDLCRGVLEFAEDDHWEIRIHWLKYIYKPVLRVLKAFHDGVAF

SEQ ID NO: 115631 - protein, 133 aa, Gossypium hirsutum
  unsure (1)..(133): unsure at all Xaa locations
  Clone ID: uC-gsflmaxxa026h03b1.pep
HASAHASAEIEIPESYIDSLPRNGRASLGDSIYKGITVDHFDPSQFLSTMDLSTEHKVLDLKNRIEASIVIWKRKMHQKDGRSSWGSGVSLEXRELFEXRAETILILLKQRYSGLSQSSLDISXVTRNRDVGH

SEQ ID NO: 115632 - protein, 50 aa, Gossypium hirsutum
  Clone ID: uC-gsflmaxxa027b02b1.pep
MNRTTASALGSIPKTFKGVQCFSIFRQLINRLMKLVKPIDILWSSAWVWT

SEQ ID NO: 115633 - protein, 141 aa, Gossypium hirsutum
  Clone ID: uC-gsflmaxxa027b10b1.pep
SGFSASWCTEVSCSPDEVESKSNGLDSSKAKNQTVEITRSPLVRTSRGRVQVLPSRINDSVIENWKKEGKTSLPDDSLDDGDDDDDYDFECKNDKFSFKKPKVCKQNMKNRRAEKKNGYKGRKYTTLCEEDGRETKFAWTF

SEQ ID NO: 115634 - protein, 100 aa, Gossypium hirsutum
  Clone ID: uC-gsflmaxxa027d06b1.pep
FTLPIQNSNTLIFSTMATPISLSLSSLASKSQQLVRNERRMLAASDDGAMMKQIQSTHAPDGRVVDVKPILQVIDNVLHHIIPNIDHAMKWWNGTHRCSR

SEQ ID NO: 115635 - protein, 124 aa, Gossypium hirsutum
  Clone ID: uC-gsflmaxxa027d08b1.pep
EDVCLVGDFTGNWKEPIKATHKGGARCEVEIRLPQGKYYYKYIINGNWRHSTSSPTERDERGNINNVIMIGDTASVRPTIQPQQKDANLIKVIERPLTENERFMLAKAARCIAFSVCPIRLVPK

SEQ ID NO: 115636 - protein, 180 aa, Gossypium hirsutum
  unsure (1)..(180): unsure at all Xaa locations
  Clone ID: uC-gsflmaxxa027e03b1.pep
VDWYAAINKPAAVVHWLNHVNVDAEYIVILDADMILRGPITPWEFKAARGRPVSTPYEYLIGCDNELAKLHTRHPEACDKVGGVIIMHIDDLREFALLWLLKTEEVRADKAHYATNITGDIYEFXWNSEMYGYSFGAAELKLRHLISNEILIYPGFVSKPDVKYRVFTTACNLKSGTELY

SEQ ID NO: 115637 - protein, 143 aa, Gossypium hirsutum
  Clone ID: uC-gsflmaxxa027f09b1.pep
SEEEEQRLDRVDSLHEPDLTSTSSSLSSVFSAVDSRSATSSGDISGTSGSSGEILTADAVVPRLLEPAPACEELKVTVTARQKCVGRNNKGVTWGFTSVIGRQREMEEAVAVVPAFMSFTCGQRGSCTAPGSEPSLGTPYSFF

SEQ ID NO: 115638 - protein, 130 aa, Gossypium hirsutum
  unsure (1)..(130): unsure at all Xaa locations
  Clone ID: uC-gsflmaxxa027g11b1.pep
VSRGRTRGGKVLNSIHARKSGSIGKWFQHHKELGTNTVKKKDMIRAENARVHSADSVAGLAAGLAALAAAGKSNGTTTGSKMSTXLAFATQLLASHCIELAELAGAXYDRVGSVVKSAVDIQTAGDLMTF

SEQ ID NO: 115639 - protein, 83 aa, Gossypium hirsutum
  Clone ID: uC-gsflmaxxa027h09b1.pep
TSVLGNQLQNSSHLIVLFIGFGLTRRELEGGTGSDNSGQESGEPEQDRWGGRRCPKRKRRQRYCTRRERARVVVLPVRVGRVS

SEQ ID NO: 115640 - protein, 149 aa, Gossypium hirsutum
  Clone ID: uC-gsflmaxxa028b06b1.pep
RYVRTREAGIQDIHHKIRPEEVELVRRDYTANEGWETFLSYEDTRQDILVGLLRLRKCGRNTTCPELMGKCSIVRELHVYGTAVPVHGRDADKLQHQGYGTLLMEEAERIASREHRSTKIAVISGVGTRHYYRKLGYELEGPYMVKYLV

SEQ ID NO: 115641 - protein, 50 aa, Gossypium hirsutum
  Clone ID: uC-gsflmaxxa028c07b1.pep
EYDFVNSQSQVNTKSKKTSFELVWLDVQLEFRKDRLSNWSSVNTLACQVG

SEQ ID NO: 115642 - protein, 167 aa, Gossypium hirsutum
  Clone ID: uC-gsflmaxxa028d03b1.pep
MALSKLEQQSPTQEPPSPSHCYTALPTQSSDENYAVLPFYSPGGRLRWCGCRMLYTGTASFFLLATLVYIFWPSDPDVKIVRMHVNRMKIHTVPIIALDMSLLITLKVRNSDVYSMDITSLDVAVGYRGKMLGHVTFEQGHLKALGSSYVEAVLQLMGLSCCRRCVF

SEQ ID NO: 115643 - protein, 99 aa, Gossypium hirsutum
  Clone ID: uC-gsflmaxxa028e11b1.pep
NRVNLRVEKCKMNKIGNRYSAFMCNEMKKQDYPKNLQSRNDAVGGDLWTDGLICAFEYVKGQGKRGQPKSGAKVLSAQYSLKEASRRRIYANEPENVNF

SEQ ID NO: 115644 - protein, 90 aa, Gossypium hirsutum
  Clone ID: uC-gsflmaxxa028e12b1.pep
LLFSPQLKARSHLFLTEQHPLFLSHVVLSDCVNVRLSVYIPLLLLSIPEHHSPDSTAVQYPVYYAPLVKSKKGKKEIRVVGFDPFAFDKL

SEQ ID NO: 115645 - protein, 129 aa, Gossypium hirsutum
  Clone ID: uC-gsflmaxxa038a06b1.pep
MPPTYLPLRWESTGDQWWYASPIDWAAANGHYDLVRELLRIDGNHLIKLTSLRRIRRLETVWDDEEQFDDVAKCRSQVARKLFLECESKKSKNSLIRAGYGGWLIYTAASAGDLGFVQQLLQRNPLLVF

SEQ ID NO: 115646 - protein, 183 aa, Gossypium hirsutum
  unsure (1)..(183): unsure at all Xaa locations
  Clone ID: uC-gsflmaxxa038f11b1.pep
KLGRSKNENIVAQSQNASGLVGLLETMRVQMEISEAMDIRTRQGLLNALSGKVGKRMDTLLIPLELLCCISRTEFSDKKAYIRWQKRQLNMLAEGLVNHPAVGFGESGRKTSEFRILLAKVEESEAFPPSTGEVQRTESLKSLRDIALPLAERAARGDLTGEVCHWADGYHLNVXPYEKLLVS

SEQ ID NO: 115647 - protein, 109 aa, Gossypium hirsutum
  unsure (1)..(109): unsure at all Xaa locations
  Clone ID: uC-gsflmaxxa038h02b1.pep
MSQNHFLPLFLYLIFVSLPRSLAQHGGGTVVTELWCVAKNNAEDAALQGALDWACGPGGTDCSRIQQGGPCYDPSDVQKTASYAFNDYYXKHGMTDDACSFXHNAALTL

SEQ ID NO: 115648 - protein, 131 aa, Gossypium hirsutum
  Clone ID: uC-gsflmaxxa038h11b1.pep
MAFTFIFCFIPPFLFIFLFHSLLLHFFKPNRPKLPLPPGTMGWPYIGETFHLYSQNPNVFFASKQKRYGSIFKTHILGCPCVMISSPDAAKFVLVTKSHLFKPTFPASKERMLGKQAIFFNQGPYHAKLRK

SEQ ID NO: 115649 - protein, 89 aa, Gossypium hirsutum
  Clone ID: uC-gsflmaxxa039f07b1.pep
FTRGRKRSGVLLYGPPGTGKTLLAKAVATECSLNFLSVKGPELINMYIGESEKNVRDIFQKARSARPCVIFFDELHSFAPARGVLENLG

SEQ ID NO: 115650 - protein, 111 aa, Gossypium hirsutum
  Clone ID: uC-gsflmaxxa039g09b1.pep
LRVREKQTRHILDTIVETLSKDSRRKFIWEEMSYLERWWRDASDDKRESFTNLVRNGQLEIVGGGWVMNDEANSHYFAIIEQITEGNMWLNDTIGFIPKNSWAIDPFGYSP

SEQ ID NO: 115651 - protein, 60 aa, Gossypium hirsutum
  Clone ID: uC-gsflmaxxa039h10b1.pep
LFQNNVQCFPSLFKYHKQKCSVHLFSNSKHFDFSPLMPATSTIDSANYGVSAIGLVFDWV

SEQ ID NO: 115652 - protein, 117 aa, Gossypium hirsutum
  unsure (1)..(117): unsure at all Xaa locations
  Clone ID: uC-gsflmaxxa040b03b1.pep
PDEPELDLYTIPSYFCWRVRNEMHETERHALTEWLEGSXISRTPKIYKEYRDFIINKYREDPSRRLTFTEIRKSLIGDVTLLHKVFRFLETGVLINFLAPSSPHEGFENDDRVWVEN

SEQ ID NO: 115653 - protein, 79 aa, Gossypium hirsutum
  unsure (1)..(79): unsure at all Xaa locations
  Clone ID: uC-gsflmaxxa040b07b1.pep
AHTXAAHTAAAPTATFPIATMTKNPQSRNQTKTLKNTNKQMFFFEFLYIAFNFSNKAAAILRKAKKEIFIYFLIIINKN

SEQ ID NO: 115654 - protein, 66 aa, Gossypium hirsutum
  unsure (1)..(66): unsure at all Xaa locations
  Clone ID: uC-gsflmaxxa040c01b1.pep
ASFIPSPRWQGPSSYAPLILPQGMVSVPGWNAYSASVSSLENLQQTNGNNXIYGTSNQNESVTGGY

SEQ ID NO: 115655 - protein, 71 aa, Gossypium hirsutum
  Clone ID: uC-gsflmaxxa040c04b1.pep
SHASGQLRMDGWPTLSIHGDKSQAERDWVLSEFKAGKSPIMTATDVAARGLDVKDVKYVINYDFPGISLGL

SEQ ID NO: 115656 - protein, 176 aa, Gossypium hirsutum
  Clone ID: uC-gsflmaxxa040e07b1.pep
GVDVLVVMVTNEAQAESVLFGDLAAVSALPSGASIILSSTVSPAYVIQLERRLQNEGKDLKLVDAPVSGGVKRASMGELTIMAAGSDDALKSAGLILSALSEKLYVIKGGCGAGSGVKMVNQLLAGVHIAASAEAMAFGARLCLSTRILFDIISNSGATSCMFENRVSHMLDNDYT

SEQ ID NO: 115657 - protein, 164 aa, Gossypium hirsutum
  unsure (1)..(164): unsure at all Xaa locations
  Clone ID: uC-gsflmaxxa041b12b1.pep
INLKIEKDTEALQLFYDHKGLTIKVSLALVPEEIESLVQRLRENSDVFVWSVMDIPRVDPXVIVYRLNVLPEMRPIKQRKRRFTPXGCRSSEARFIKEIEYPNXISNVFMVKKASCKWRICIDFTNLNKAYPKDSFPLPSIDHLMDESLGYKFMSFIDAFSCYD

SEQ ID NO: 115658 - protein, 61 aa, Gossypium hirsutum
  Clone ID: uC-gsflmaxxa041d09b1.pep
MKNSYGETTPMTRTTYPGTYPNQMRVVDEVIREMHIPTYLLDITMLFELKKDGHPSIYSGD

SEQ ID NO: 115659 - protein, 146 aa, Gossypium hirsutum
  Clone ID: uC-gsflmaxxa041h03b1.pep
YFSAHASERPSHHHNFKAGALNVLLRVSAIISNSPYILMLDCDMYCNDPTSVRQAMCYYCDPQTPSSIAFVQFPQTFRNICQDDIYDSQIRHLFKILWHGFDGVGGPTISGSNLYIKREALLGSFSKQQELMALKRSFGPSHDFIK

SEQ ID NO: 115660 - protein, 123 aa, Gossypium hirsutum
  unsure (1)..(123): unsure at all Xaa locations
  Clone ID: uC-gsflmaxxa042a08b1.pep
MGSLETSKPHIVIVPFPAQGHVNPMMLLAKLLHSRGFFITFVNTEFNHRRLVRSKGPDFVKGLPDFQFETIPEGLTSSDRNATQDLPVLCDSIRKHCLAPFVDLLAKLNSSXQVPTVTCIISD

SEQ ID NO: 115661 - protein, 114 aa, Gossypium hirsutum
  Clone ID: uC-gsflmaxxa042a11b1.pep
FSKPCKATYLKSHSPIAEKNARDAVHEDKSARGVRSPRVPMNKSDGTFEPPRLSKDKSDTAFQSPRLSKDKPDTAFQSPRLSRGKPNTDVQSPKLPEIGKELICVSNQVSSSND

SEQ ID NO: 115662 - protein, 96 aa, Gossypium hirsutum
  Clone ID: uC-gsflmaxxa042c09b1.pep
MAVSSSASSSLLRAASLYSRTRFFHSSFRNLSPSSPSLLDHQRSLASAAVRSFHCSVPRWSHRLHWRSPFSLRAQIRAVNPVIERLEGSFPLWLLN

SEQ ID NO: 115663 - protein, 103 aa, Gossypium hirsutum
  unsure (1)..(103): unsure at all Xaa locations
  Clone ID: uC-gsflmaxxa042e08b1.pep
MAIFKSLLTSLLLSLFFLRFAESSDPLVIENMVEENSFNDKKIYCGXACAERCKLSSRPNLCKRACGTCCSRCNCVPPGTYDNYDVCPCYRDMTTHGGRHKCP

SEQ ID NO: 115664 - protein, 143 aa, Gossypium hirsutum
  unsure (1)..(143): unsure at all Xaa locations
  Clone ID: uC-gsflmaxxa042h04b1.pep
MDKDKHQQQLSLAKSSRQSCNEWIFRDVPSDITIEVNGGTIALHKFPLVSRSGRIRKLVEEHRDSDISRVELMNLPGGAESFELAAKFCYGINXEITPLNVAQLCCVSDYLEMTEEFSKDNLYLHAEQYLESIVYKNLEMCVE

SEQ ID NO: 115665 - protein, 102 aa, Gossypium hirsutum
  unsure (1)..(102): unsure at all Xaa locations
  Clone ID: uC-gsflmaxxa043d03b1.pep
MASGGGNNRNGTHRNSLKGTTTTSTASTDKPLSVNSNPSKPAFKNKSSPLTGASSGLRKSSPGSLGGGAAKDDAGVPGRVRVAVRLRPRNAEESVADADXAD

SEQ ID NO: 115666 - protein, 134 aa, Gossypium hirsutum
  Clone ID: uC-gsflmaxxa043g08b1.pep
MLKPHVYHPHTTTKTLASPLHKPFSHGTALAFLPFNACSSLGKTAKPFKARVVPNKIKAAVDVNLTDDGILTDYTVKGVITVKQTVGGFLSNLGLSRGIDDIQDLLGKSILLELVSLELDPKTGQEKETIKAYA

SEQ ID NO: 115667 - protein, 63 aa, Gossypium hirsutum
  Clone ID: uC-gsflmaxxa043h07b1.pep
LNEYAYNIHGVGVWVRYVDPDAEVVSLSPKTLLESDRYVCEICNQGFQGDQNLQMHKRRHKGS

SEQ ID NO: 115668 - protein, 160 aa, Gossypium hirsutum
  unsure (1)..(160): unsure at all Xaa locations
  Clone ID: uC-gsflmaxxa045b03b1.pep
VVVAMGLLVGAFLMVAIKKVLVLGAVGSVVVPMGLGLAWNCIWGRKGLLGFIRKYPDSELKGAVDGQYVKVTGIVTCGRIPLEXSYQKVARCVYVSTELYEYKGWGGKSXNPKHRCFSWGGSYCESYVADFYISDFQSGLRALVRARYGAKVAPFVEPVT

SEQ ID NO: 115669 - protein, 126 aa, Gossypium hirsutum
  unsure (1)..(126): unsure at all Xaa locations
  Clone ID: uC-gsflmaxxa045d11b1.pep
MALLTASDTFVLYFLCFMLCSFGISNGGITGNFVRKKYSPDMPLDSDVFQVPSGYNAPQQVHITQGDMDGSGXVIISWITPDEPGSNMVYYWPENSNHKNKAEGIFVRYKFFNYTSGYIHHCTINN

SEQ ID NO: 115670 - protein, 133 aa, Gossypium hirsutum
  unsure (1)..(133): unsure at all Xaa locations
  Clone ID: uC-gsflmaxxa047a10b1.pep
MAATPDRNPEEQQADPENVKEQPLPTKSMTLVSPNSSQDAAPVAHRRDGAGQSGSFASAGDRNVYSPTIYAPQPQAFYYRGYDNSAGEWDEYPPYVNADGLETXSLGVFNDNPSLVFHPGYGYNSQMPDGPYS

SEQ ID NO: 115671 - protein, 130 aa, Gossypium hirsutum
  Clone ID: uC-gsflmaxxa047g08b1.pep
SCIDGSKAVMFYFSLGLLALGAGGVKGALPALGGDQFDHKDPKEAKALARYFNWLLLSTTLGACVGVTGIVYLTTEKHKWYWGFFISTVATFIGFTVLALGKPLFRLREPKMADSPIIRIPQVQYYLSLH

SEQ ID NO: 115672 - protein, 96 aa, Gossypium hirsutum
  Clone ID: uC-gsflmaxxa047h09b1.pep
FGIGYCSKEHQKIYQEWFNFVDSDNDGRITGNDAIKFIGMSNLLPPDLKQVWTTADSKRQGFLGFKEFVFAMQLVSLVQEGHQISHDLLNGDGFMI

SEQ ID NO: 115673 - protein, 162 aa, Gossypium hirsutum
  unsure (1)..(162): unsure at all Xaa locations
  Clone ID: uC-gsflmaxxa048a08b1.pep
MASTMPLPFFGGTCTKAAFSFSLRSSSPAVPFERLQLFRSTCRTTTRIRSSLFHSMKAKATADLDQDKESGVVATGKPVVEHSRTYIEARSEQELLSVLRTEADAGRLPPIVAAGMEEVYHNYINAVFQRGDPAAVGVVSVNITVAFDXLIFGCEDPFELNP

SEQ ID NO: 115674 - protein, 172 aa, Gossypium hirsutum
  Clone ID: uC-gsflmaxxa048h01b1.pep
DAWVTDVGLGRTDLGNLLWNLLLLSYAANFKMKTMQRQFLKMLNSGFLPDLTTFNIRALAFSRMSMFWDLHLSLEHMKHESIVPDLATYGCVVDAYLDRRLGRNLDFILSNMNADESPIILTDPLVFEALGKGDFQSSSEAFMELKSQKKWTYRQLIAVYLKNTVPRDQIFW

SEQ ID NO: 115675 - protein, 108 aa, Gossypium hirsutum
  unsure (1)..(108): unsure at all Xaa locations
  Clone ID: uC-gsflmaxxa049d02b1.pep
QLCFSLSTYLFFLGTKKSLRLQVSDDSPEYHSAVSLQQPTLNLLCSLLNGVINSLERAADEKSLLLNKIRDINELSXQEVDEDINMWITQDLGSGSDDLQMRRGIPLV

SEQ ID NO: 115676 - protein, 49 aa, Gossypium hirsutum
  Clone ID: uC-gsflmaxxa049h06b1.pep
EAGSRVGKCLSLRMNHKKLFKKRMPNKKKAKLIYIYQIRDIGYSLAIAS

SEQ ID NO: 115677 - protein, 50 aa, Gossypium hirsutum
  Clone ID: uC-gsflmaxxa051f07b1.pep
KWDLKTSLLAGAGVKTSERALRERIVWRGKRFTVGVSGLPGPHLIVEEGR

SEQ ID NO: 115678 - protein, 79 aa, Gossypium hirsutum
  Clone ID: uC-gsflmaxxa052g03b1.pep
MKFLQFSMLLLPILLDALLSFSMGASTHQDFLQCLSLRSNDSTSISKVIYTRNNSSYSFVLESTIRNLRFNSTDTPKTL

SEQ ID NO: 115679 - protein, 66 aa, Gossypium hirsutum
  Clone ID: uC-gsflmaxxa054a11b1.pep
AFCLLSVPFLGPLPGKNCVNLVPSAVSSPTLVGRTQATLPQVTTESTPSCNPNITACRHGPPLQTR

SEQ ID NO: 115680 - protein, 146 aa, Gossypium hirsutum
  unsure (1)..(146): unsure at all Xaa locations
  Clone ID: uC-gsflmaxxa054e11b1.pep
MPHLLLHYHVPITTVHLRCSFPSPKPTAHIHLRSNPTTGATVKCMANPRRVKMVSKQIRRELSDMLLTDKVLQYAILPEAALGADRYLFSLTTISDVEVSADLQVVKVYVSVFGDERRKEIALAGLKSKAKYVRSEXLGKRMKLRF

SEQ ID NO: 115681 - protein, 72 aa, Gossypium hirsutum
  unsure (1)..(72): unsure at all Xaa locations
  Clone ID: uC-gsflmaxxa054h02b1.pep
NKSYTRFIYSKTKSYPWIGRFTLTNLPLGSYPCKIEXRGMCTKLLVQTNRTINDYSGKKKNRQPKRGARNGS

SEQ ID NO: 115682 - protein, 55 aa, Gossypium hirsutum
  Clone ID: uC-gsflmaxxa054h03b1.pep
GELNPINSIRRAEILYSPWNYSNESYYTPEFLCYLLTSENIHPRSKWRAAVNLKK

SEQ ID NO: 115683 - protein, 124 aa, Gossypium hirsutum
  Clone ID: uC-gsflmaxxa054h09b1.pep
MTDPIGPSTSTIPNPSATTLLHPRREPFEHGLLPMQKLIFTDPLQALTSLKQKLVSSSIQRVDSAALADALQISLDHARLVLDTLASVLHSESDPLVTSRFDDVDSVGADLLDLILVLDIQSYK

SEQ ID NO: 115684 - protein, 105 aa, Gossypium hirsutum
  unsure (1)..(105): unsure at all Xaa locations
  Clone ID: uC-gsflmaxxa055a02b1.pep
LHAVIPSSKRSEAYKLLFGELNEERQKARHMMKRMFNTSFGATFLTDKGQESVFAYYIHQFADVYXTSKPENFFVLFTRDVAFMHPWDIKIMPYHVKISSSLFKT

SEQ ID NO: 115685 - protein, 73 aa, Gossypium hirsutum
  unsure (1)..(73): unsure at all Xaa locations
  Clone ID: uC-gsflmaxxa055a11b1.pep
SSFFIDHPGAVPISTAHGEELQKLIGSPAYXIECSAKTHENVKAVFDATIKVVLQPPKQKKKKSRAQNACTIL

SEQ ID NO: 115686 - protein, 124 aa, Gossypium hirsutum
  Clone ID: uC-gsflmaxxa055b04b1.pep
IIMCEDPRCQVGQHFGCVIIPEKPMEGNPAVPDFFYCELCRLKRADPFWLTIANPFYPVKLAIANIPTDGTNPMHSVEKTFQITRADKELLSKQEYDVQAWCLLLNDKVPFRMQWPQYADLQVN

SEQ ID NO: 115687 - protein, 118 aa, Gossypium hirsutum
  Clone ID: uC-gsflmaxxa055c08b1.pep
IITFFFTLFNFFSSPRSITNFQASSQASFVRQSTSLLHFQFYSLNTFQPLSQGHSNGVRRACCWHCNLSSALLFVNICNIHRKLNDYVRNFKRIRDEFNCQMEDIELQLKAELLRPLG

SEQ ID NO: 115688 - protein, 146 aa, Gossypium hirsutum
  Clone ID: uC-gsflmaxxa055d06b1.pep
PVNSKPSPRKATASCSTASDSTEKQLPNYLKPTKSSRTDAALKNLKKPGAEDPCQSSSVMRRRSFDRPPSAARAHKALISPVRQKSASASASTSTSPSFSSKSATAPKAPLERVAKKAIAAAKPHTQTLSSLGGPLYHYLCSTRTS

SEQ ID NO: 115689 - protein, 95 aa, Gossypium hirsutum
  unsure (1)..(95): unsure at all Xaa locations
  Clone ID: uC-gsflmaxxa055f01b1.pep
MLGNGVVGILSESSNKWERRVPLTPSHCARLLHSGREKTGLARIIVHPSANRIHHDSLXQDVGCHILDDLXSECGXFLGFQPPKLDLFLPYKSLC

SEQ ID NO: 115690 - protein, 63 aa, Gossypium hirsutum
  Clone ID: uC-gsflmaxxa055f02b1.pep
HDKHSDYDEFTLLPQPQPFSLPSTIPDWPPGQGFATGKINLGELEVVKITKFEGVGACDSVHR

SEQ ID NO: 115691 - protein, 67 aa, Gossypium hirsutum
  unsure (1)..(67): unsure at all Xaa locations
  Clone ID: uC-gsflmaxxa055f08b1.pep
MEDLSKYAHSPAHLAVARREYAGLRRXIISTLPRLAKAGEANTEVESLWADERADACXPVLNRRDAP

SEQ ID NO: 115692 - protein, 135 aa, Gossypium hirsutum
  Clone ID: uC-gsflmaxxa055g01b1.pep
PQSGYFIYYQSHSRFYFPGFPFPFALCSFRVLPVSRFLSCSSYLFIYSFTVSFKIPCFPMASIQLTRVLWSCKLSANIALSSRKCCSFRRTRQLDFGPLLKRNFQNRKLTAIRSGKSGNEGSFFSAIEGEENLMF

SEQ ID NO: 115693 - protein, 80 aa, Gossypium hirsutum
  Clone ID: uC-gsflmaxxa055g12b1.pep
RWLKEGCFQNASPFKFTAFQAGPRICLGKDSAYLQMKMALAILCRFFKFNLVPNHPVKYRMMTILSMEKGLKLKIARQSC

SEQ ID NO: 115694 - protein, 90 aa, Gossypium hirsutum
  Clone ID: uC-gsflmaxxa055h08b1.pep
PQGHCRYDRHDDVLKKDCYAHSVVFDLQTNEIRPLMILTDTWCSSGQFLPDGTLLQTGGDLDGFKKIRKFEPCEPDRFCDWVELKDVELI

SEQ ID NO: 115695 - protein, 69 aa, Gossypium hirsutum
  Clone ID: uC-gsflmaxxa057a02b1.pep
MCMQIYFSFIYWSFWVTPRNCCNLFLGCFTEFMKKSIRQLFRCESKKYRIEFFIFMMLWWSNSTLHDYF

SEQ ID NO: 115696 - protein, 103 aa, Gossypium hirsutum
  Clone ID: uC-gsflmaxxa057b01b1.pep
MTRRVRRKVAKKGKDDAVSLSYLEIEVEDLGLERNGDVDWTSLPDDTVIQLFFCLNYRDRVSLSSTCKTWRVLGASQCLWSSLDLRAHKFDTRTATSLVLSVC

SEQ ID NO: 115697 - protein, 150 aa, Gossypium hirsutum
  Clone ID: uC-gsflmaxxa057b02b1.pep
TNYADKNIGLRESEAILVIKQLQEKIEILETEKSSSQENLNCLVELATEQNISAREKFDELCKELLNAREETRVAREELAYNESGGRKNGDCDFVIELSKEVEDLISEAQESKEVAQKLSSLVDEAFQSFSATIKEFLDFKDMMCQSSDQ

SEQ ID NO: 115698 - protein, 168 aa, Gossypium hirsutum
  Clone ID: uC-gsflmaxxa057b10b1.pep
MNRFIVRSVMQNHLSNGRSISNGHVCSSAIVGRSLELSGQHNVVMLVRFEWRRMMSSTPASVEKVSSGREEKMENSVTEETKGKDSSALSYWGISRPKITRADGTDWPWNCFMPWETYSAKLSIDLKKRHVPKKLGDKFGFRIVKLLRLPTEYFLQRRYGSRAMMLET

SEQ ID NO: 115699 - protein, 148 aa, Gossypium hirsutum
  Clone ID: uC-gsflmaxxa057b11b1.pep
RPRVRADLKKAVRQSLDTYQAQRVPLQVNNHIVSPNDVSNEGLNETDVFGTGLQNEVGEYNCFLNVIIQSLWHLRRFRDEFLRRSTSDHVHVGEPCVVCSLYEIFIALNIASTDARKEPVAPTSLRIALSNLYSDSNFFQEAQMNDAF

SEQ ID NO: 115700 - protein, 50 aa, Gossypium hirsutum
  unsure (1)..(50): unsure at all Xaa locations
  Clone ID: uC-gsflmaxxa058a12b1.pep
LICSKSMNPLWMGLNNLTWGWSWLERWMAAXPWEGHGVTGKEPNNDQSLV

SEQ ID NO: 115701 - protein, 130 aa, Gossypium hirsutum
  Clone ID: uC-gsflmaxxa058b01b1.pep
MAVFKLYAVHSRQISAQPLGYHNISPEPHIFSQFYTFNADSHSLMIRCIREHRLATPAEIRAATPRSVLKSWRAVWKDPNEDTAYLTAWERIQDKLTGHVDPDSGNEFICFKNNSSQFVLHVNQWQEIVM

SEQ ID NO: 115702 - protein, 51 aa, Gossypium hirsutum
  Clone ID: uC-gsflmaxxa058b11b1.pep
LGSVLSKECTNTPTQLLSHTFRYQLLKSQNETWKQEMFAYYHLIPTDELLG

SEQ ID NO: 115703 - protein, 64 aa, Gossypium hirsutum
  Clone ID: uC-gsflmaxxa058f07b1.pep
SKEKKKDFVSDQSFQWEKAPSRSGALLLGAAVRNLRRYLNRQSRYRLLGPSLLHFRLRLLALVT

SEQ ID NO: 115704 - protein, 130 aa, Gossypium hirsutum
  Clone ID: uC-gsflmaxxa058f08b1.pep
MNSPLQRMPQIRFRGLIIYFIITMTLLYISYSNLLFSKKDRKSSDITIVSNKIEAPPFNHSSNTTSSHVQNPADQKRPNLVEPPPRRYLRYDTHLKHIAFGIASSSNLWEIRKEYIKTWWRPKETRGWFG

SEQ ID NO: 115705 - protein, 177 aa, Gossypium hirsutum
  Clone ID: uC-gsflmaxxa058g07b1.pep
RLRVRIDPDTGRSLPKNTPGELCVRSQCVMQGYYKNKEETNRTIDKNGWLHTGDIAYIDDDGDIFIVDRIKELIKYKGFQVAPAELEAILLTHSSVEDAAVVPLPDEEAGEIPAACVVMNPNAKENERDIMEYVASNVAHYKKVRVLQFVDTIPKFPSCKIMRRLLKDKMMENMPKP

SEQ ID NO: 115706 - protein, 169 aa, Gossypium hirsutum
  Clone ID: uC-gsflmaxxa058h10b1.pep
FLNLITRGVKARGIDEEDLADRLSELPDNVILHIMSSLPMKEAVRTCLLSTRWKDLFTSISNIELDGVLRKGALRNRFMEFVDGFLSLRKDISVDRFRLCYGPGIDHRKINEWILYAVRHGVRELELIFQSGTLQTRHFTDLELGVFTCKTLLTLRLFNLPSLCLTIST

SEQ ID NO: 115707 - protein, 106 aa, Gossypium hirsutum
  Clone ID: uC-gsflmaxxa060b04b1.pep
HAFALPSPFWRPQPLRSPPMAAALECWSSRATTADDDMVEQVLMRSNDRSEDTSSSSSDFAKLEAPFAKNKRVPEVSRNRFLGQLPLSRTLSISTLPPHVISFLLL

SEQ ID NO: 115708 - protein, 88 aa, Gossypium hirsutum
  Clone ID: uC-gsflmaxxa060d11b1.pep
MLISPSHSSLDNVNDRVTLSLYYETSLCQHCASFISNDLVKVFHTDLHTIINLRLVPWGNVEIHCQHGEEECYLNTIHSCVIHFWPLM

SEQ ID NO: 115709 - protein, 151 aa, Gossypium hirsutum
  unsure (1)..(151): unsure at all Xaa locations
  Clone ID: uC-gsflmaxxa060f02b1.pep
FILKDEWFKKGYKPPVFEEKDDTNLDDVXAVFKDYEEHHVTXQREEQPTAMNAFELISMSKGLNLGNLFDAEEGFKRETRFTSKCSANEIIHKIREAGKPLGFDGHKKNYNMRLQNLKAGRKGNLNXSTEIFQVAPCXHMVEVLKANGDTL

SEQ ID NO: 115710 - protein, 72 aa, Gossypium hirsutum
  Clone ID: uC-gsflmaxxa060f10b1.pep
SRSCSHLGTPMVIIMANMIVILFDSFFRGSSVSLAMVFWLLSWLLIDLLNCSIHPPNRTPADDHDDDDQIKG

SEQ ID NO: 115711 - protein, 120 aa, Gossypium hirsutum
  unsure (1)..(120): unsure at all Xaa locations
  Clone ID: uC-gsflmaxxa060f11b1.pep
SGLTGGRIIWTDSELGPSPSEVAAAVLRXRNRKMEKMESSVGEGWSLDGSMEGLDSKLERWRTELPPVYDSSNEFSSFLSSQTPTTSTKKSRHSRRRAHKKGLFSCFGNICGCEISVTCG

SEQ ID NO: 115712 - protein, 112 aa, Gossypium hirsutum
  Clone ID: uC-gsflmaxxa060g02b1.pep
MDMNFTADSSLAPSRWRKVAYGGMQPGYDDNHTDETFLEDMAMNANVVKRNMLKVMQDSGSISQYLCIVFLGVLVWIYTLKSTLNENFLLLLDISLLGSGFINLVLTGEMLF

SEQ ID NO: 115713 - protein, 127 aa, Gossypium hirsutum
  Clone ID: uC-gsflmaxxa061b04b1.pep
PSRPLAGSKFCLFEYGPEISAIGEAMSFGCVPVVITDRPIQDLPLMDLLAWQQIAVFVGSSGGVNEIKRVLGRVVVEEYEDMRESAAVASKHFVWNDTPDPCDAFHMVMYQLWLRRHTIRYAEREWA

SEQ ID NO: 115714 - protein, 130 aa, Gossypium hirsutum
  unsure (1)..(130): unsure at all Xaa locations
  Clone ID: uC-gsflmaxxa061e03b1.pep
MCVSSDTEMGVPVIKLSIFMVVRGLDNRITAILCAWTAHHRGGLALIYDNIELIFNVHAVKTVIGLGLLNGENMLAYRTCPVTKIYKKLSHLTDHGLAFMLSTMGAWSALKCHMVPGILNFXSLHSWWGI

SEQ ID NO: 115715 - protein, 87 aa, Gossypium hirsutum
  Clone ID: uC-gsflmaxxa061f07b1.pep
TRFREGKRRDCYCLLLYSNMLSSFLNGVLIVGIQREDELSEFLSLFFFSKILKFCLYCLDLLERERDGEERQAREKKKIRSRFLSLS

SEQ ID NO: 115716 - protein, 88 aa, Gossypium hirsutum
  Clone ID: uC-gsflmaxxa064a01b1.pep
FYHKDEEESHYVKLQGAAADNPLQFVNIDRIINLLPIDPESERTFRQRRREWLAQRQVEEMNQNPRKDTTCNNQDPILVADGRDRLIR

SEQ ID NO: 115717 - protein, 97 aa, Gossypium hirsutum
  Clone ID: uC-gsflmaxxa064a11b1.pep
FLYACEDAWDCAGDGGQKSAGQSKAEESLTAYLSAEIPAENPPTSLWTPLPSPHKTTSQITGHSPGCPPLHYPFYDMNATMGGPSPDYGPHDDSSPT

SEQ ID NO: 115718 - protein, 162 aa, Gossypium hirsutum
  Clone ID: uC-gsflmaxxa064b01b1.pep
FVTNKFNIYPEQISSWLMDWIPEKGGYLLGNLQPAHMDFRFFTLGNLWSIVSSLGTPKQNEAILNLIEAKWDDIAGQMPFKICYPALENEEWRIITGSDPKNTPWSYHNGGSWPTLLWQFTLACIKMGRLELAQKAVSLVEKRLSIDRWPEYYDTRRGKFIG

SEQ ID NO: 115719 - protein, 42 aa, Gossypium hirsutum
  Clone ID: uC-gsflmaxxa067a04b1.pep
MAIKGVDFKWIDGFFLSMLATSVIIGAIHWKAYHHWAYPLHI

SEQ ID NO: 115720 - protein, 84 aa, Gossypium hirsutum
  Clone ID: uC-gsflnu33B002d05b1.pep
QLAFSLSHYKHWRRFLATAHSGHTNSLSLSPPPSPSLPLSTGKLSDLPAFPSLLLRLSTDPLYLARPPSPRNHLIPPSTGQQKG

SEQ ID NO: 115721 - protein, 126 aa, Gossypium hirsutum
  unsure (1)..(126): unsure at all Xaa locations
  Clone ID: uC-gsflnu33B003h09b1.pep
YMETALKSSAAIVSACQAFIGTEEADETAYQWLINTDYKAHKALNIIARFYHDLATNEDEEKRGLVCGTSCFMKQYGVTRKEAVEAYSELIDAAWXDMNETCLKPMPVSNNNHATSFYLWPVNGPF

SEQ ID NO: 115722 - protein, 101 aa, Gossypium hirsutum
  Clone ID: uC-gsflnu33B004c09b1.pep
CLVKIEDDRQSPREYVVDLVGEPGNIHGPDSSINGGFLSSMPSPFQISYLKEFQQPDMDTAPCCQIKDLKNSHSFCGIEKSQQFKSNGLLESQKAPYVYTN

SEQ ID NO: 115723 - protein, 65 aa, Gossypium hirsutum
  Clone ID: uC-gsflnu33B004d09b1.pep
TSGFVPDIFKSYKRSLEDYISIPISLKHEYFTKSEKSKECNISHNKYVKAPLHQTFQVSQPPSWQ

SEQ ID NO: 115724 - protein, 122 aa, Gossypium hirsutum
  unsure (1)..(122): unsure at all Xaa locations
  Clone ID: uC-gsflnu33B004e01b1.pep
MEEDEEEAPKELNTINSSGGFLDVAPDKLSVKYTSVSLHGHDVGVVQADKPAPMRRLLYYFEIHVKDAGAKGQIAIGFTNEGYKMRRQPGREVNSCGYHADDGXLYRGQGKGDAFGPTYTTG

SEQ ID NO: 115725 - protein, 80 aa, Gossypium hirsutum
  unsure (1)..(80): unsure at all Xaa locations
  Clone ID: uC-gsflnu33B004g07b1.pep
FSWVPQLFPELNKIVFLDDDVVVQHDISSLWTLDLNGKIVGAVVDSWCGENCCPGRKYKDYLNFSHPGIPSHLDQDXCAW

SEQ ID NO: 115726 - protein, 118 aa, Gossypium hirsutum
  unsure (1)..(118): unsure at all Xaa locations
  Clone ID: uC-gsflnu33B004h04b1.pep
VDASRVQISNSKGNYNEKSIYSVASNTLNARMNKVFDPEVAALLDDSDLLRFGSDVEDLEEDFXVVRANTGEEGEGDESGKKCILRCADDIISGSCNIFESLLFAPLGTDFTLLDPYR

SEQ ID NO: 115727 - protein, 132 aa, Gossypium hirsutum
  unsure (1)..(132): unsure at all Xaa locations
  Clone ID: uC-gsflnu33B005a09b1.pep
MGASESSLAAYSLSSADQISTISQRSETVDPILEKLKSLRITSPILTTPPTDGSLTDILVRRPSSSSSQAAVNPKVFLELLSAYRDWQEEKAQTICKKQEDIEYKIEVADALTVKLLQXLNHSVSTMKTALQ

SEQ ID NO: 115728 - protein, 82 aa, Gossypium hirsutum
  Clone ID: uC-gsflnu33B005e01b1.pep
TPSARSTSIKAPSLKSTLQLPIFIYQPFLPFSEKPIKTHISENTLTFSFFLAQANRRGSSNAKLTLKRPLKRCPSAVFRIKP

SEQ ID NO: 115729 - protein, 102 aa, Gossypium hirsutum
  Clone ID: uC-gsflnu33B006a07b1.pep
YVRITISPMDPIACPLHSRFSWLLLAAVAVINGTGWVHRRSSRSYAVFIRLSTATISRFIMFTRRSSGKHWWIIDVLLPQLSSHGKSRGKKSGSQENAYHHY

SEQ ID NO: 115730 - protein, 56 aa, Gossypium hirsutum
  Clone ID: uC-gsflnu33B006d03b1.pep
KPNLGYWWKGIEVLRWGCLWVKSTAAVSTSLFCQTEMRYRKHQKKEGECSPSIGRV

SEQ ID NO: 115731 - protein, 36 aa, Gossypium hirsutum
  Clone ID: uC-gsflnu33B006g02b1.pep
ISRCKSTSILIWVHDRGNNAIVVQLINHCCLFSKQT

SEQ ID NO: 115732 - protein, 98 aa, Gossypium hirsutum
  Clone ID: uC-gsflnu33B008a07b1.pep
IAREEGSPDFILIDCPAGIDAGFITAITPANEAVLVTTPDITSLKKKKKKKKKKKKKKKKKKKKKKKYKKPLKKKKKKIKNGGGRFRGPMFTSPGMQR

SEQ ID NO: 115733 - protein, 150 aa, Gossypium hirsutum
  Clone ID: uC-gsflnu33B008b04b1.pep
FTRPNTSTWLARFTLDLETKATFQVGVPFIGETGVEISSKYETGIEWGKTKTMTTDMEVTHQVRVPPMTKVTVYLKMTNGTCDVPFVFTQKDSLYNGFFVTTDVLGNTFTGTNYYNIQYDSKEEPLTSEPLTSEPPTSGNQNINVYCEII

SEQ ID NO: 115734 - protein, 153 aa, Gossypium hirsutum
  unsure (1)..(153): unsure at all Xaa locations
  Clone ID: uC-gsflnu33B008c06b1.pep
GKKVRSLRANDGSDPRVRVPSESERVSKAXMEFLTLKNALARLEAKKEAGLLEYQQSLDRLANLEREVSRAQEDSQGLNERASQAEAEVQTLKDALTKLQAEREANHVQYQQCLEKINNLENSISHAQKDAGELNERASKAETEAQALKAGPF

SEQ ID NO: 115735 - protein, 56 aa, Gossypium hirsutum
  Clone ID: uC-gsflnu33B011c12b1.pep
LFVCFFCFFSFLQWKSLLKSQFSSAALANECDRRTFFYKHIFLMVPTFFSGCNKGK

SEQ ID NO: 115736 - protein, 67 aa, Gossypium hirsutum
  unsure (1)..(67): unsure at all Xaa locations
  Clone ID: uC-gsflnu33B011d06b1.pep
MDPSRGLHQEMGNPLPESMAVNSKGQQQQERKARPQPEEALKCPXCESTNTKFCYYNNYSLSQPRYF

SEQ ID NO: 115737 - protein, 110 aa, Gossypium hirsutum
  Clone ID: uC-gsflnu33B011e02b1.pep
MASLTPGVLLKLLQSMNSNVKVLGEYRSVLLQVISIVPALTGSELWLNQGFFIKVSDSSHSTYVSLSQEDNELILNNKLQLGQFFYVERVGPGTPVPIPCGVRPAPGKDP

SEQ ID NO: 115738 - protein, 39 aa, Gossypium hirsutum
  Clone ID: uC-gsflnu33B012a12b1.pep
FHASGNFRCNLLLNFLCTMDCQPLIGDFKVHVRVCFHCF

SEQ ID NO: 115739 - protein, 58 aa, Gossypium hirsutum
  Clone ID: uC-gsflnu33B012b09b1.pep
FPRVRTGSMDDHQDPWPRVVTSIALGRGAPLRSPQVGRAYVIICGSGGLRSRGPYLKY

SEQ ID NO: 115740 - protein, 124 aa, Gossypium hirsutum
  Clone ID: uC-gsflnu33B012e04b1.pep
MSKKGGASLPKDDPWRASAGKSVPKIHHSPVLRIRQNPNSNYAIAVMKHPDPIGSGLATEAIVEAEGPECIVPGQVTPVRLLGLKVWPIEVNTKFLEPVGKELMLLAKFMDDAVNPMNKSFIDR

SEQ ID NO: 115741 - protein, 47 aa, Gossypium hirsutum
  Clone ID: uC-gsflnu33B013a05b1.pep
AAPLLPGRHPPSTRPLVPKIKNFYGWMAICVIYPKDKYDKIIKKSYI

SEQ ID NO: 115742 - protein, 167 aa, Gossypium hirsutum
  unsure (1)..(167): unsure at all Xaa locations
  Clone ID: uC-gsflnu33B013a07b1.pep
SGVEIIGTGEDGMAVFPKADKKKASGFEIVGFEVVPCSIKYDPEAMTKLHMYDKVSSVNCPLGLDKSQIIRERERISFTYEVEFVKSDIRWPSRWDAYLKMEGARVHWFSILNSLMVITFLAGIAFVIFLRTVRRXDLTRYEELDKEAQAQMNEELSGWKLVVGDVF

SEQ ID NO: 115743 - protein, 39 aa, Gossypium hirsutum
  Clone ID: uC-gsflnu33B013b04b1.pep
CLCLSNEQCRCISLLIQHSMFHSHLCYILHYGLGEKKKQ

SEQ ID NO: 115744 - protein, 148 aa, Gossypium hirsutum
  Clone ID: uC-gsflnu33B013f11b1.pep
MASSATLSSRRANVRSRLSVTVSELEKPELPLKSIPGDYGLPFIGAIKDRLDYFYNQGRDEFFKFKIQKYQSTVLRTNMPPGPFISSNPKVVALLDGKSFPILFDISKVEKKDLFTGTYMSSTYLTGGYRILSYLDPSEPKHAKLKQL

SEQ ID NO: 115745 - protein, 157 aa, Gossypium hirsutum
  Clone ID: uC-gsflnu33B018g02b1.pep
MSRSLQFFTPSRAPYFTLHKLPSTSYTRFPVINFPSKKHYITITKSLSSDLDAASSQVLDSGNGQTGVSRVLSADNVVAVQSHAPSESGAAAGIEVDAVTEAELKENGFRSTRRTKLICTIGPATCGFEQLEALAVGGLNVARINMCHGTREWHQMV

SEQ ID NO: 115746 - protein, 173 aa, Gossypium hirsutum
  unsure (1)..(173): unsure at all Xaa locations
  Clone ID: uC-gsflnu33B018g12b1.pep
PPASRNSPGVLFVCTHRTLMDPVILSNVLMRKIPAVTYSISRISEILSPIPTIRLTRIREVDAEKIKNELAKGDLVVCPEGTTCREPFLLRFSALFAELTDRIVPVAMNYRVGFFHATTASGWKALDPIFFFMNPRPVYEVTFLNQLXMEATCSSGKSPEDVANYVXRILAAT

SEQ ID NO: 115747 - protein, 102 aa, Gossypium hirsutum
  Clone ID: uC-gsflnu33B018h08b1.pep
SGWHCSFCFRHISEFIFKMKAYSHNDRVRFSHYLNPKRVQRVICKGADLFDMLPEEYTFKDIIGKMGPIPHSFSAVHLPSYLLENADKYKFLLPGNCLRENE

SEQ ID NO: 115748 - protein, 137 aa, Gossypium hirsutum
  unsure (1)..(137): unsure at all Xaa locations
  Clone ID: uC-gsflnu33B019h09b1.pep
MPTPSRNFAQIQPQELEHIFKMFDANGDGKISSSELASIMGSLGQQPSDEEVQKMIKEFDADGDGFINFEEFVELNTKGVDSKEVLENLKDAFSVYDLDGNGSISAEELHKVLKSLXDDCSITECRKMISGVDNDGN

SEQ ID NO: 115749 - protein, 154 aa, Gossypium hirsutum
  unsure (1)..(154): unsure at all Xaa locations
  Clone ID: uC-gsflnu33B022b03b1.pep
LGNVGTFCLNVISALRAGKLSRKGCKAFLAYSGTSDSEGPSIRDIXTVKDFFDVFSDELPRLPPNHEVDFGIELLPGTAPVSIAPYRMAPKELVELKAQIQELLDRGFIQPSVSPWGAPVLFVKKKDGSMHFCIDYRXLNKLTIRNEYPLPRID

SEQ ID NO: 115750 - protein, 83 aa, Gossypium hirsutum
  unsure (1)..(83): unsure at all Xaa locations
  Clone ID: uC-gsflnu33B022c07b1.pep
MSVTPRWSRKKSHFPLLAVLLLAFITCSILYNEFSIQQIHESPDHGSTPTTPQTSFTYVKPNLPNGASEVLGXRFRSCNSTRN

SEQ ID NO: 115751 - protein, 83 aa, Gossypium hirsutum
  Clone ID: uC-gsflnu33B022c12b1.pep
RRYYFHPTKRAKRKKKIISPKWVLQNSEFSVPLEVKQRAVSKRKMEIQGLNAKFNPLFRFSFKDSERYGCGVAKQEPKKEEEE

SEQ ID NO: 115752 - protein, 65 aa, Gossypium hirsutum
  Clone ID: uC-gsflnu33B022e07b1.pep
PTRPPTRPLFQLSYILRLPFITPFFFPSFLRTLSEKSHPLLCNYPRFGFGKYPSQTLFFLFPINS

SEQ ID NO: 115753 - protein, 127 aa, Gossypium hirsutum
  Clone ID: uC-gsflnu33B022f07b1.pep
NGGSGECATTGCMTDLNKKCPSELKFDGGDACKSACDAFGNPEYCCSGAYSSPTACKPSIYSEVFKSACPKSYSYAFDDATSTFTCTGADYTITFCPNSPSLKSSKDPAAESTGESGPDTDSVQAAA

SEQ ID NO: 115754 - protein, 174 aa, Gossypium hirsutum
  unsure (1)..(174): unsure at all Xaa locations
  Clone ID: uC-gsflnu33B022g06b1.pep
TRSGHVTRAGKAVENHGVLGCLQDMREEVRTLARKGSRSSXSGMSAIGVEEQLVPVIQRLMTYLEHGSNSDNDWKTEVSVVGLSNXSPSSSNRNAQLESASSTKAPLLGKSIKQEKKNKDHIVAVRDIELEEHRKSTDRVKTDSTTLDPSNQNGASSSITLQKDLGSTRIRPGS

SEQ ID NO: 115755 - protein, 89 aa, Gossypium hirsutum
  Clone ID: uC-gsflnu33B022g09b1.pep
IIWKSRNKLIFRITIPCPIGAIKRIFDMFQSSSIPSRTPPARTHSASISDARTSQWSLSLNMVQNRQNNMIRGSTIIHNSNGFQLMSIH

SEQ ID NO: 115756 - protein, 109 aa, Gossypium hirsutum
  unsure (1)..(109): unsure at all Xaa locations
  Clone ID: uC-gsflnu33B023c08b1.pep
YSLTWKHGDIFLMCLSSSQILSSYLLKPESFPPSYRSFLNKHVGKDQVILQGVKEHASGLPYTNLEAIEKXYKAKGADVKLDPNMKIPCFVIHRNQACSSHVFTFFSEA

SEQ ID NO: 115757 - protein, 79 aa, Gossypium hirsutum
  Clone ID: uC-gsflnu33B023c10b1.pep
PGILNSSPINKTQIIHIKKSKKEESKITKAINPIKPKINLTLDPKRPKTKLTFQQKRKTAAAPFHHARRRTSHDRPTRV

SEQ ID NO: 115758 - protein, 73 aa, Gossypium hirsutum
  Clone ID: uC-gsflnu33B023f08b1.pep
SRVRALGVGRSLLSHGNMPPSFMVMSNGDSRDEISDTNPSLALSLALPYPKAGGSGSGTTLKLASDMKLPKCQ

SEQ ID NO: 115759 - protein, 49 aa, Gossypium hirsutum
  Clone ID: uC-gsflnu33B024g11b1.pep
LASARKRLQESYKEAENAKKQRTVQVMDIHELPKPKNAFFAKYKGGSFY

SEQ ID NO: 115760 - protein, 55 aa, Gossypium hirsutum
  Clone ID: uC-gsflnu33B025d12b1.pep
FWVFLSGFQPRTWPSTGAHQPWLRHTRRLEVPKIGSFNLLLFPFFFLLKDPKKYF

SEQ ID NO: 115761 - protein, 53 aa, Gossypium hirsutum
  Clone ID: uC-gsflnu33B025h11b1.pep
VTRSLAAIGMITSVIIYEKILVPILRNATGNERGIKILQRIGIGMLFSIVTMI

SEQ ID NO: 115762 - protein, 95 aa, Gossypium hirsutum
  unsure (1)..(95): unsure at all Xaa locations
  Clone ID: uC-gsflnu33B049e02b1.pep
MEGSSGKGYAWAISAGFNAAFAAVAAKFLLHXLKALSSLQATVTNFATNFLTSGLAGFFLFEELLSFKWFAGAMIIVIGVLILSKSSVEKREKKD

SEQ ID NO: 115763 - protein, 160 aa, Gossypium hirsutum
  unsure (1)..(160): unsure at all Xaa locations
  Clone ID: uC-gsflnu33B049f09b1.pep
SFTRSPTRTSTRPSTRPLEDESSDTIDNVKFKIQDKEGIPPDQQRFIFVGKQLEDGRTLADYNIQKESTLHLVLRLRGGXMQIFVKTLTGMTITLEGESFDTIDNVKXKNSSKEGILPDQQXFIFAGKQLRDGRTLVHYNIHKDFTLNLGLRFHGGMPIF

SEQ ID NO: 115764 - protein, 42 aa, Gossypium hirsutum
  Clone ID: uC-gsflnu33B050a07b1.pep
SVHTEHLQINHNITIFFLRSLYSYNDLYLSHLILNIYFKIQL

SEQ ID NO: 115765 - protein, 105 aa, Gossypium hirsutum
  unsure (1)..(105): unsure at all Xaa locations
  Clone ID: uC-gsflnu33B050c08b1.pep
HLTDLRAEAQRLGPAGLALHYANIIMQVDTLVARSSSIPANTREALYQNLPPCIKSALRPKLRSFHVKEELTVXPEVKDEMEKTLQWLVPLAANTTKAHHGFGWV

SEQ ID NO: 115766 - protein, 121 aa, Gossypium hirsutum
  Clone ID: uC-gsflnu33B050g06b1.pep
WASAQTLKGGDQLVFKYSSGIHSVVELGSETAYKNCDLGTSLDSKNTGNDVVKLNKVGTRYLACGTLGHCDQGMKMKITTVVGNGTFTPAFDSDTLAAAFFPRSFTTFLLFSPLLMPYFLL

SEQ ID NO: 115767 - protein, 152 aa, Gossypium hirsutum
  Clone ID: uC-gsflnu33B050h02b1.pep
SRVRPRVRPRVRLPAELKHTLLFTTWELETTVRSAKEEITKRELELFHFKDVLTKTMKERDEAQCRCQKLMVEKFMLEQQLQHKEQPKQQQNQQDTASLSGVSSSEDESNSNISLVSSPGLDSLPQPSLPQEALKLAANRPLPEKGRLLQAV

SEQ ID NO: 115768 - protein, 92 aa, Gossypium hirsutum
  Clone ID: uC-gsflnu33B051e03b1.pep
MRSKNSEIVLGVWRNDQLIPIFSPIFPLFLTFFSPLLATLFPFFANIFPSLLVFLLSAFFLCFLQSMALPFIRRLSLSLYIYIPSIFFLKFF

SEQ ID NO: 115769 - protein, 55 aa, Gossypium hirsutum
  unsure (1)..(55): unsure at all Xaa locations
  Clone ID: uC-gsflnu33B055f03b1.pep
VPFGSAEVRAIFSSGSGRVTGCMGTEGKIVDDCRIRVNXNGRTVHVGVLDSFAKG

SEQ ID NO: 115770 - protein, 136 aa, Gossypium hirsutum
  unsure (1)..(136): unsure at all Xaa locations
  Clone ID: uC-gsflnu33B056a07b1.pep
MSVSGLIASPSRCCLRLSDCNQGLVCRQVPSIPIASKPKAKFGKLHLERSRLTVSFRRWKMQKTHLIKCAMDASYGDMASESGAAMFPRINVRDPYKRLGISREASEDEIQAARNFLISKYXGHKPSVDAIEAAHD

SEQ ID NO: 115771 - protein, 98 aa, Gossypium hirsutum
  Clone ID: uC-gsflnu33B056c04b1.pep
RNSEFSDVKPLLLQEPSQKPIVVSMAACKQEDIDSDHIPQYYSDEFHSSLLEAADSSYPFEPDQSDLSQDEEDSLHPPASSSNFGFPVEGHPFWSWTY

SEQ ID NO: 115772 - protein, 59 aa, Gossypium hirsutum
  Clone ID: uC-gsflnu33B056c10b1.pep
MYMEKLMRLIEMTPLLLLLFLPLVFAGHDYNQALSKSILFFEAHTSGYLPHNQIVTWRA

SEQ ID NO: 115773 - protein, 151 aa, Gossypium hirsutum
  Clone ID: uC-gsflnu33B057f04b1.pep
PTRPVVIDYFTKWVEATSYANVTKSAVSRFLKNEIICRYRMVERIISDNALNLNNNMIVTVYNQFKIKHHKSSPYRLKMNGAVEAANKNIKKIVGKMTETYKDWHEKLPFALSAYRTSIRTSIGATTFSLVYGMEGSFAHWRRDSFPSGFI

SEQ ID NO: 115774 - protein, 54 aa, Gossypium hirsutum
  Clone ID: uC-gsflnu33B057g07b1.pep
SHASGEIRKWGGFNTCTVTCMTEDYRKLNSKTICICIMLMMNDMPTIKVSVLIV

SEQ ID NO: 115775 - protein, 121 aa, Gossypium hirsutum
  unsure (1)..(121): unsure at all Xaa locations
  Clone ID: uC-gsflnu33B058a05b1.pep
YVNFSDPNPSAVPQHECVSKNAQKKLLKHPKYEASKAAKKAQMREHTQRDAERKRREWEEKLAVLPEDXRLKLIYSRKELRRERVEKWSEERGPKIQRLNHVKGSGQNIGVDRVWSHIKTH

SEQ ID NO: 115776 - protein, 70 aa, Gossypium hirsutum
  unsure (1)..(70): unsure at all Xaa locations
  Clone ID: uC-gsflnu33B058d04b1.pep
MPFGAHWCSFGSLSRLPSFEVGEFSSISYXELLVQEAIFAEHSAFAGHPCPYVGYYGPTVYSLILKFLWK

SEQ ID NO: 115777 - protein, 47 aa, Gossypium hirsutum
  Clone ID: uC-gsflnu33B058e10b1.pep
FYFIYFFFFFFFFFFFFERTCLHKSFAFSRISIYNLYIRRVESRDVP

SEQ ID NO: 115778 - protein, 65 aa, Gossypium hirsutum
  Clone ID: uC-gsflnu33B058g10b1.pep
LCLLDNNTQNGRPRFSEQMKLDTETSGFFSGHRGGRGGRFGGGYHGRGYGHVGRGRVLDMSMLAT

SEQ ID NO: 115779 - protein, 106 aa, Gossypium hirsutum
  Clone ID: uC-gsflnu33B060d07b1.pep
GPAGFFGSPTRCESRTQSAGCCFLADASFQFSMDPVFHVEVAPTLSFALRASASRSPPLPSFPMTVFSLASYLLMVVSGFVSTSSWSPLALVLPTILPLAPATTVL

SEQ ID NO: 115780 - protein, 110 aa, Gossypium hirsutum
  Clone ID: uC-gsflnu33B060f01b1.pep
INTIILFHQKKRLSQMVISPPKQPTTATNLKSKLLSPQILLTKSPDTSSNFISRKKHIFTLCILTNLFTMATLTSKPSPLIFHDTIFISPIKRPIISNNLTQKKKTHLLL

SEQ ID NO: 115781 - protein, 138 aa, Gossypium hirsutum
  unsure (1)..(138): unsure at all Xaa locations
  Clone ID: uC-gsflnu33B060f10b1.pep
TISNLEMELGSTWAVQESIINGSPISDDLKIPETNGKRKYLMVVGINTAFSSRKRRDSVRATWMPQGEERKKLEEEKGIVMRFVIGHSATSGGILDRAIEAEDRKHGDFLRLEHVEGYLELSAKTKTYFATAXCLWDA

SEQ ID NO: 115782 - protein, 99 aa, Gossypium hirsutum
  unsure (1)..(99): unsure at all Xaa locations
  Clone ID: uC-gsflnu33B060h12b1.pep
LLNGGFYRQCFFLSKPFWRYPXYYIAFHKYANQGFYKNEFEGLSFPGNQVGGPPTITGDEVLRSFWQAEMGYSKWIELAILXAMVVVYRLMFWGIIITV

SEQ ID NO: 115783 - protein, 128 aa, Gossypium hirsutum
  Clone ID: uC-gsflnu33B061b08b1.pep
EGSDIHTLYQATRTERNGTSGNFNKWGNATCFPVNHVVKRTACQFHPGCPLAQLSCSLKVKVSTYSSYGEPCMVHYSDCISDQTFKSWTCHLSPPATPSVSIMHPFSRDNKAPKPLHSIRVLPWDQAN

SEQ ID NO: 115784 - protein, 169 aa, Gossypium hirsutum
  Clone ID: uC-gsflnu33B061d09b1.pep
ERFSWADVSVAFSLLPAFQHALGEGERTKFTHVTRWFNTVVHQENVKAVVGEVQLPAKASTFDAAKFKQLSAKAQAQKKHDQPKKEQKQPEPKKEKPKKKEEEDEADEPAVQEPKFVDPFASMPAGTLNMDNWKRVYSNEDTATKAIPWFWENFDPENYSIWYGEYKYP

SEQ ID NO: 115785 - protein, 80 aa, Gossypium hirsutum
  Clone ID: uC-gsflnu33B061f03b1.pep
AMWVPLHLLQQFWSQLQLQVENWVTGIPHFHHHGLISQQLMVHIRKEPFSPPFILSQLLINMLVVVAVHSGIWIYIYMWL

SEQ ID NO: 115786 - protein, 154 aa, Gossypium hirsutum
  Clone ID: uC-gsflnu33B061g05b1.pep
MLMAAATFNSLTLPFSKPEFPFSSIARTHIPTATLNLSRFRPTGFLLCSLSSDHPTTAAGGQLHHKTNTNSTDPQPQIHTCTWNWKGYSIRYQCSGSSGPALVLVHGSGANSNHWRKNIPVLAKSHRVYAIDLIGYGYSDIPNPREVGDSFYTF

SEQ ID NO: 115787 - protein, 93 aa, Gossypium hirsutum
  Clone ID: uC-gsflnu33B061h10b1.pep
LSARVMNPNLGAVSPSIERKKGSPLLLLGLTSATERVSGDTITGIPGVRGTWRQAKRWWRAWWPCWRGATAEGLAARFFCLPKILKIVGWDPG

SEQ ID NO: 115788 - protein, 171 aa, Gossypium hirsutum
  Clone ID: uC-gsflnu33B061h11b1.pep
PRVRIFCLVLLFISVAKGLNPKCDIQDHGSTLQVFHIYSQCSPLKPSKPLSWEEDMLSMLAKDQARLQYLSSLVAGKSVVPVASGRQIVQSPTYIVRIKIGTPPQTMLMAMDTSNDAAWIPCNGCIGCSSKVFNTAKSTTFNTLGCHAAQCMQVPNPTCGRSACIFNMTYG

SEQ ID NO: 115789 - protein, 94 aa, Gossypium hirsutum
  Clone ID: uC-gsflnu33B062b11b1.pep
HYEKGFLFQEFMMQKGGPLPKVVQWADTEPASAGILLGSLTRTGLGCKHEGNLKHHQEVLLMLRLERIRAEPMLTNGCAACTPRLRILEVILPR

SEQ ID NO: 115790 - protein, 35 aa, Gossypium hirsutum
  Clone ID: uC-gsflnu33B062c05b1.pep
NDYLLSWQEHYSILNFTQLIVGKTAVGCRRLDENF

SEQ ID NO: 115791 - protein, 110 aa, Gossypium hirsutum
  unsure (1)..(110): unsure at all Xaa locations
  Clone ID: uC-gsflnu33B062c12b1.pep
SGHLYERFLKIMILSVLKNTHRPVKFWFIKNYLSPQFKDVIPHMAQEYGFDYELVTYKWPTWLHKQTEKQRIIWAYKILFLDVIFPISLEKVIFVDADQVVRADXGDLYD

SEQ ID NO: 115792 - protein, 66 aa, Gossypium hirsutum
  Clone ID: uC-gsflnu33B063a05b1.pep
AEYTVPYAIVHVNLPLILCLMLIIIDFEYAVDVVVSWFLGLHISDCMYMIWNLYRCCVSFNKTGSE

SEQ ID NO: 115793 - protein, 165 aa, Gossypium hirsutum
  Clone ID: uC-gsflnu33B063a08b1.pep
STANRLFAAVTGAKLSRIKHDLHSIKKGNMIMKEYVAKIQNTCALIEASRSRISEAEKVKIVLVGLPSEHDVVLTLASFSFELLPMQRLVDVLLEYKIRQTRVAQDVPFHANLMEAAPTPIAVEPARGGHSFTGGNGRGFNSQILCQFCGKFGRLAQRCYYRFNR

SEQ ID NO: 115794 - protein, 64 aa, Gossypium hirsutum
  unsure (1)..(64): unsure at all Xaa locations
  Clone ID: uC-gsflnu33B063b03b1.pep
KFNQIRRVXXXKKKYFIILIFYKGLLFVFCIIFVVLGCWLGFPSLFPRLGVFFIFLYLFGSFHP

SEQ ID NO: 115795 - protein, 144 aa, Gossypium hirsutum
  unsure (1)..(144): unsure at all Xaa locations
  Clone ID: uC-gsflnu33B063e03b1.pep
LLSQFYSVKSELQLNYYAESCPSAAEIIKQQVIKLYNKHGNTAVSWVRNLFHDCMVKSCDASLLLRRVKGMESEQESDRSFGMRNFKYINTIKEAVEKECPMTVSCADIVSLSARDGIVMLGGPRIEMRSXRKDSKQSYPTEVQ

SEQ ID NO: 115796 - protein, 43 aa, Gossypium hirsutum
  Clone ID: uC-gsflnu33B063f09b1.pep
ELDCILPHLFKSLCIRSKSKLVLQCKNFCHFILLKIGVVDGTG

SEQ ID NO: 115797 - protein, 50 aa, Gossypium hirsutum
  Clone ID: uC-gsflnu33B063g05b1.pep
YSRAELKQVIRQEMESNRDCKDRQKIRFLISEGTERLKGLTEMLGMQGHC

SEQ ID NO: 115798 - protein, 117 aa, Gossypium hirsutum
  unsure (1)..(117): unsure at all Xaa locations
  Clone ID: uC-gsflnu33B064b09b1.pep
TSVEAVILVELFKHPHLLLLQVRNSFFKLPGGRLRPGESDIDGLNRKLSRKLSASEDGNETEWQVGECLGMWWRHDFETLMYPYLPSNAKKPKECTKVLLVRMPDSXKFIVPKNLKL

SEQ ID NO: 115799 - protein, 77 aa, Gossypium hirsutum
  Clone ID: uC-gsflnu33B064f10b1.pep
HASVWFCGMNLNTAFEALTSKRPCGPNKRAIRGATYDLAKNDPWKEPFENLPGHAFEGVADWERKLIQDRVRSLRGT

SEQ ID NO: 115800 - protein, 56 aa, Gossypium hirsutum
  Clone ID: uC-gsflnu33B066c07b1.pep
MGIIRSSFSFIAGTACGIYVAQNYNVPNIKKLVDSAFFVAKHVEEKYRKPKNKDDD

SEQ ID NO: 115801 - protein, 81 aa, Gossypium hirsutum
  Clone ID: uC-gsflnu33B066d04b1.pep
FNPSRFENPASLPPYCFIPFGGGPRICPGYEFARIETLVSIHYLITRFTWNLLCSDNSFSRDPMPVPTKGLPVQISPRKLP

SEQ ID NO: 115802 - protein, 62 aa, Gossypium hirsutum
  Clone ID: uC-gsflnu33B066f02b1.pep
MFFLYHTSFSFITTTNFCPPNFALPSDNGGWCNPRWPHFALAMPMFLTIAEHRTDICPIIFQ

SEQ ID NO: 115803 - protein, 91 aa, Gossypium hirsutum
  Clone ID: uC-gsflnu33B068d04b1.pep
KKRNQMAKIRMFKKRLWKIYIPLKILVQYGESHRTSFRPLLNSDLKRVVVEAQCPRCRQNVEDSSHIFQQCPASSIKGLMSRSGFSTVDFG

SEQ ID NO: 115804 - protein, 68 aa, Gossypium hirsutum
  Clone ID: uC-gsflnu33B068d09b1.pep
YNSAGSSMPHNPTDLHLSLPEMHLSHLNNILGIHGSNTNFMESKYNPLLENPGPIDFLSRNYDVMANG

SEQ ID NO: 115805 - protein, 65 aa, Gossypium hirsutum
  Clone ID: uC-gsflnu33B068e10b1.pep
KKKESKVNHLEDITRTSTVSRQGPAHPVPAKERTNTATNTNKNSRTANEKMAFLIYFPFSFFLRL

SEQ ID NO: 115806 - protein, 109 aa, Gossypium hirsutum
  Clone ID: uC-gsflnu33B068g09b1.pep
MGFEVLGDNDSPVMPIMLYNPAKIPAFSRECLKQNVAVVTVAFPATPLLLARARICISASHTKEDLLKALEVISQVGDMVGIKYFPAEPNKQQQDQQQQQPGKDTIKLD

SEQ ID NO: 115807 - protein, 76 aa, Gossypium hirsutum
  Clone ID: uC-gsflnu33B070a12b1.pep
LCLCSRGGLSFRWGSFNPRKLTRFKELLKKPIFEAWAGPMIRIWNVRLSLILRYSYFICLNSILFSFLLFIPLFFP

SEQ ID NO: 115808 - protein, 164 aa, Gossypium hirsutum
  unsure (1)..(164): unsure at all Xaa locations
  Clone ID: uC-gsflnu33B070f12b1.pep
DTVQSLEFEDINGGHVGIDVNNLRSLETASTAYFVEDEGQNRSLELLNGNPMQLWIXFEQVDKLLNVTLAPMGSNKPSQLLLLTTVDLSNGLLDSMYVGFSSSTGEVVSSQYILGWSFSKIGKAQSLDYSKLPSLPRRKLKANGDLQIIIPVIVVIALLVTIFG

SEQ ID NO: 115809 - protein, 89 aa, Gossypium hirsutum
  Clone ID: uC-gsflnu33B070g02b1.pep
LQIKLGRIRTRLDINRVSKRKHKERFHRLTAVNANDRVLDASNLSNTNPRKRQAVAMVLRAKTSKVIIQCRNKTFLRRRRFPRRIFFRT

SEQ ID NO: 115810 - protein, 79 aa, Gossypium hirsutum
  Clone ID: uC-gsflnu33B070g12b1.pep
VRNFSICFLWGTREKMTLRSAHDNSLQPTEAKSAKEASDVKQDTIFEKSSTVSFIFRPLTTYYASQTSIYHEHCYKVQR

SEQ ID NO: 115811 - protein, 114 aa, Gossypium hirsutum
  Clone ID: uC-gsflnu33B070h09b1.pep
QGTAPRRISLQINLSTGPMKGSAGCVDGGSMTSPGLVEEEVQSALTEVTEAEAVGQTSSSDESEMNIVNQAIAPRRIRLQLSTGPMNGSAGCIDGGNMTSPGLGKEEVLPCLSV

SEQ ID NO: 115812 - protein, 70 aa, Gossypium hirsutum
  Clone ID: uC-gsflnu33B070h10b1.pep
KALDGVNGVQVVPRSPFALEEINQQREFQSTHDKSFFTANQPLLMQVWQQRPSCLRPARCCMKGVLNFFS

SEQ ID NO: 115813 - protein, 148 aa, Gossypium hirsutum
  unsure (1)..(148): unsure at all Xaa locations
  Clone ID: uC-gsflnu33B072d06b1.pep
AIKTFGFEQNIDEACVYKRLGDGKVVFLILYVNDILLIQNYVGKLSLIKLWLTXQFSMKDLGEANFVLGIQILMDRKKKVIALSQASYIDKILKCYTTINSRKGNQPSVSGFHLSLEDYPXKAKERENMRKVRYDSEIXKLMYAMLCT

SEQ ID NO: 115814 - protein, 89 aa, Gossypium hirsutum
  Clone ID: uC-gsflnu33B072g12b1.pep
LINLYLKKKKEPNTPTTKRSDIKPPLSCPQKIRTSANDNQTKHTIAVITHSSFFLVCGSHLTKPPGPTEDPHDALVNANSKDQISPARN

SEQ ID NO: 115815 - protein, 44 aa, Gossypium hirsutum
  Clone ID: uC-gsflnu33B074f09b1.pep
SNIVVIQISLTITRLLRLEQIPTTMNRSTAKHGVSTKGSFLFSS

SEQ ID NO: 115816 - protein, 110 aa, Gossypium hirsutum
  Clone ID: uC-gsflnu33B074h03b1.pep
MFQMLQTVGQFSGMPTKDPYLHLRLFMKVSDAFKLAGVPKEALRLKLFSYSLRDRARAWLNSLPPNLISTWQELAERFPMKYFPPSKNAKLRNEITAFQQMDDESRTRGR

SEQ ID NO: 115817 - protein, 151 aa, Gossypium hirsutum
  unsure (1)..(151): unsure at all Xaa locations
  Clone ID: uC-gsflnu33B075c05b1.pep
DTDLGYIFIGTTETECSRISSSGVCDQLHYFLGRLIASYLVRVLHVFRVDSLLLFFFSYNFLFIFSSYFYSFLLYXIFSFLFYLNXFFSSIFIFLSLLFIVLFLTSFIIILFIISIFLFYSFQFLLSLSFLLFFFFLFISSLFFLLSFYFF

SEQ ID NO: 115818 - protein, 82 aa, Gossypium hirsutum
  Clone ID: uC-gsflnu33B075c08b1.pep
STRPLNLKTQFSHTKNDMEVYLVIRDLVSLLFVGLLMIWGCRTLNWVWLAPKRLESCLRQQGFAGNSYRFLSGDIKELSTMS

SEQ ID NO: 115819 - protein, 82 aa, Gossypium hirsutum
  Clone ID: uC-gsflnu33B075e08b1.pep
STRPAQPRKAPKNSPTSVLRSTFRCLRLSRKMDKVAELRSISEAAAGCNRDRLLFSSPLIPANYMKVGRGSRKREPSDVEDA

SEQ ID NO: 115820 - protein, 56 aa, Gossypium hirsutum
  Clone ID: uC-gsflnu33B075h05b1.pep
RKGENCRRVAYLISIRSHGFKKVGSIQVSNLSSVMFESSNEVCFRLFFWTLPNFSL

SEQ ID NO: 115821 - protein, 150 aa, Gossypium hirsutum
  unsure (1)..(150): unsure at all Xaa locations
  Clone ID: uC-gsflnu33B088b05b1.pep
LASAHASAHASGSKCLFGHTSIGYLGHIVSRQGVQVDPDKIKAIQSWPIPRTVKAVRGFLGLVGYYYRFIRHFAAIAGPLTDLLRTDAFQWTSLAHTVFEHLKQLLSESPILALPDFSQPFVVETDAXGTVISAFLLQGSPPFAYFVLYF

SEQ ID NO: 115822 - protein, 124 aa, Gossypium hirsutum
  unsure (1)..(124): unsure at all Xaa locations
  Clone ID: uC-gsflnu33B088f08b1.pep
RERPHPNECSGGDLDGDQFFISWDKDLIPCQTEPPMDYTGRRPRIMDHEVTLEEIQKFFVDYMINDTLGAISTAHLVHADREPYKARSENXIALAXLHSMAADFAKTGTPAEMPCALKPTELPA

SEQ ID NO: 115823 - protein, 58 aa, Gossypium hirsutum
  Clone ID: uC-gsflnu33B089c02b1.pep
SVIRLDDDVDNIENTLTSALVDTKSNAAVVDKSITTFDPPVSSSWEQVPPTMILITPD

SEQ ID NO: 115824 - protein, 59 aa, Gossypium hirsutum
  Clone ID: uC-gsflnu33B089c08b1.pep
TKLTSEWLLDTACSFHMCPNREWFSTYSSIEGRVVRMGNDSSSKVIGIGTVKIKRTRER

SEQ ID NO: 115825 - protein, 145 aa, Gossypium hirsutum
  unsure (1)..(145): unsure at all Xaa locations
  Clone ID: uC-gsflnu33B089d01b1.pep
MEGNNLEKILQEGNLFRQLNCLIVAHLRHHNLTQAARAVASATMTPLDVEAPPNKLLELVAKGLAVEKDETLRGVPSSTLFDLGTALGYGLNPDPRVSSVDFSAVQDTKGSSKSFSKHETRHLSXHKNIARCARFSPDGRFVATG

SEQ ID NO: 115826 - protein, 65 aa, Gossypium hirsutum
  Clone ID: uC-gsflnu33B089g08b1.pep
SGNEYSLAGYHKNTNCGNVSLPIACIAAGPYARRRVPISLVEHDAPLYSVRLRTRGRTRGRPSSK

SEQ ID NO: 115827 - protein, 127 aa, Gossypium hirsutum
  Clone ID: uC-gsflnu33B089h12b1.pep
LFRWYREHVVWTDKELKLKLLRRGILTRIYAPMVIIQGLRDSGLFGSVIQSAQTTLSKEIKSSNTSRVDKPGMISSRKIGVKETTATARRILEIPNETSYESAIPPLSPPILDGLHIGILQHIRLTC

SEQ ID NO: 115828 - protein, 70 aa, Gossypium hirsutum
  Clone ID: uC-gsflnu33B090b06b1.pep
NELETNFLNYFELRGAARTYLSFNRARNEALSCYPLLYLYQNISNFHQSLVNLMEITITSWNTCNSYSIK

SEQ ID NO: 115829 - protein, 88 aa, Gossypium hirsutum
  Clone ID: uC-gsflnu33B090g02b1.pep
QRTNYFISIFLSGVVVENYIDNKPYNYQSIQNEKTDLDSNPPSPQGISAEPRLHKLFAMVRYMLSSPNLIYLVLWIPEQEILKREQNE

SEQ ID NO: 115830 - protein, 140 aa, Gossypium hirsutum
  Clone ID: uC-gsflnu33B091c12b1.pep
LFHSQPISTEKENGDLLSKSFQDIISTLPKGNPWGFPDHFLQYHGFWHSSVFLQGILSAQQQIQAQPADIILCSAPKTGTTWLKSLTYATITRTSFDDSTSPLLSKMPYDVVPFMELDHAHFSTNRDLGSPFWVLICLTS

SEQ ID NO: 115831 - protein, 161 aa, Gossypium hirsutum
  unsure (1)..(161): unsure at all Xaa locations
  Clone ID: uC-gsflnu33B092a06b1.pep
MSLPVTQGKTLPDAWDYRGKPTERSKSGGWTSAAMILGGEACERLTTLGIAVNLVTYLTETMHLGNATAANTVTNFLGTSFMLCLLGGFIADTFLGRYLTIAIFATVQATGVTILTISTIIPSLRPXKCTRDNATTCTPASXIQLIILYLALYLTAFETGD

SEQ ID NO: 115832 - protein, 52 aa, Gossypium hirsutum
  Clone ID: uC-gsflnu33B092b09b1.pep
FQGFIPKFQRPRLNFDYNEVARIRRSRYEGKSLFLTLFFLTNIDHEESKKEK

SEQ ID NO: 115833 - protein, 149 aa, Gossypium hirsutum
  Clone ID: uC-gsflnu33B092c08b1.pep
MSDDLLLDPDIRVWVFLPIVIITFFVGILRHYVSILLSSTKKVELQQVIDSQAMIRSRLLRENGKYIPKQSFLMRRHYFNNEESGYFKISQKRNTTAPNPMTDPSMMTDMLKGNLTNVLPMILIGGWNNWTFSGFGTTKVPFSLTLRFK

SEQ ID NO: 115834 - protein, 67 aa, Gossypium hirsutum
  Clone ID: uC-gsflnu33B092f09b1.pep
ETHHRRCYHGNTTSEGRRREWVRSFSPFSRRPRRLRLLGLPPFGSTPTTEEEPRRRNLRQSLCQCDA

SEQ ID NO: 115835 - protein, 171 aa, Gossypium hirsutum
  unsure (1)..(171): unsure at all Xaa locations
  Clone ID: uC-gsflnu33B092g09b1.pep
SVLQKAKADKDAIFKCELEPGTGETKICATSLESMLECVRNAVGPDVDFELISTSHPTMTTPILQSYTITEPSXEIKSTKKVACHSLPYLYTIYMCHYDTYETNIFKVALVGDNGDKVDAFIVCHIDTSAWSPKHVAFSLLRTKPGILVCHTFTEGHDVWIRLPLLQSFKT

SEQ ID NO: 115836 - protein, 54 aa, Gossypium hirsutum
  Clone ID: uC-gsflnu33B092h04b1.pep
VRTLMLEMPSAICVSLQVLLLIPPILVAILLSPIGVSQALVIQNMPAPFGLLLI

SEQ ID NO: 115837 - protein, 115 aa, Gossypium hirsutum
  unsure (1)..(115): unsure at all Xaa locations
  Clone ID: uC-gsflnu33B094b01b1.pep
IRLSRDISFQELVQKMLAIYDQAHTIKYQLPGEDLDALVSVSCDEDLQNMMEECNVLEEGGPQKPRIFLFSSSDLDDVQYGLSSXSDSEMQYVVAVNGMDLGSRKKLNCLKCYRE

SEQ ID NO: 115838 - protein, 79 aa, Gossypium hirsutum
  Clone ID: uC-gsflnu33B094b03b1.pep
RIACAFMKLVERFIKIGIVKFDEASSVENPLLNHTDNEGNAMNEEMLENVHISAEYEETTGEEILLDVRPYKLGSVLNN

SEQ ID NO: 115839 - protein, 73 aa, Gossypium hirsutum
  Clone ID: uC-gsflnu33B094c09b1.pep
LLNPRSSLLKRETFIKNGVSPFWLRLTALWPQNPPLASISTKQEWIDGQIARYSLFFSLSLLSIITMNGSKEK

SEQ ID NO: 115840 - protein, 102 aa, Gossypium hirsutum
  Clone ID: uC-gsflnu33B094c11b1.pep
VPRVRPRVRKMEGAKPGSCEALVRRLLERLASSKESSMKDMQELAVRLFNKGKTTSEDTQTPNMEIDSKRKQQLNSNSNLSPLARFLLSRWQNQTSRDLNPS

SEQ ID NO: 115841 - protein, 78 aa, Gossypium hirsutum
  Clone ID: uC-gsflnu33B097c08b1.pep
SEEQTVHEQPHLTPDLQRLSFSSLRISIKPRTHKKLQIQAIQWFDGNQLAEADEFEDKMKELEGICNPIIAKMHQGAG

SEQ ID NO: 115842 - protein, 43 aa, Gossypium hirsutum
  Clone ID: uC-gsflnu33B098g08b1.pep
IQLLGISRGYMAPEYAVRGMLTQKADVYSFGVLATEISCGKRN

SEQ ID NO: 115843 - protein, 89 aa, Gossypium hirsutum
  unsure (1)..(89): unsure at all Xaa locations
  Clone ID: uC-gsflnu33B107b01b1.pep
LRVWEEMQRDGLEPDVMAYVTLAAGLRKGGRAQERXELFNEMTKKGILIERVMNGGLIEGFVKDGKVGSACGIGKDLLDGAYEHEPADI

SEQ ID NO: 115844 - protein, 115 aa, Gossypium hirsutum
  Clone ID: uC-gsflnu33B107d08b1.pep
MDLQQLDPLQISIPKASDPYSIMNNSSVWLEIRLFYVRIAPCVIDSAPDHLTLCYLRREIGFSLEVNGSRVPASDSASFTLRRDRLDRESSEVTYLSTDSVRVTGGVEFECTRMK

SEQ ID NO: 115845 - protein, 104 aa, Gossypium hirsutum
  Clone ID: uC-gsflnu33B107f07b1.pep
LFLTIFSLIFFLKEGKKREEKKKKKVHFAEDVVDPRKDGEEFRKQLKNRVRINNSAALNSSTKFKKFGGGKDRGMPANRVAIYTGILRDRGVQRLAYSCLFFKV

SEQ ID NO: 115846 - protein, 80 aa, Gossypium hirsutum
  unsure (1)..(80): unsure at all Xaa locations
  Clone ID: uC-gsflnu33B108e12b1.pep
NGADASWLARKILTIWNLENPMVIHGEPSPWRKKVHFVGPRLDFVGSLYXDDYDLIEPPVNFNLDDRNCNWSVVLLLDLF

SEQ ID NO: 115847 - protein, 172 aa, Gossypium hirsutum
  unsure (1)..(172): unsure at all Xaa locations
  Clone ID: uC-gsflnu33B108g11b1.pep
FCSNRECTMLLYEYMPNGNLDDLLHGKNKGENLVADWVTRYKIALGVAQGICYLHHDCDPVIVHRDLKPSNILLDGEMEARVADFGVAKLIQSDESMSVIAGSYGYIAPEYAYTLQVDEKSDIYSFGVVLLEILSGKKSVDSEFGDGXSIVDWVRSKIKNKNGVIDILDKNA

SEQ ID NO: 115848 - protein, 85 aa, Gossypium hirsutum
  Clone ID: uC-gsflnu33B108h09b1.pep
FTRPPPPPPADHHRNHTHHPRRRPPQYSQNHKPSTGNKLNTGKKLGLLFIGIVIILQFGVAGFLVFKRRQLLKVNGTYEACSSSS

SEQ ID NO: 115849 - protein, 81 aa, Gossypium hirsutum
  Clone ID: uC-gsflnu33B109c09b1.pep
LSTRPPTRTSTRPGEDEDEDDDEDDSMSADIAANMMVDVPNSQSSLNPVSMLTDEPKQNQTAEAEDGWVVVSSRKNKGRRN

SEQ ID NO: 115850 - protein, 55 aa, Gossypium hirsutum
  Clone ID: uC-gsflnu33B109f08b1.pep
KGPLLAGDMINYPFKIMFKPALEDLTCGTVTFFKFFLSRNTVFLQFNVLLIFIFK

SEQ ID NO: 115851 - protein, 56 aa, Gossypium hirsutum
  Clone ID: uC-gsflnu33B110e12b1.pep
EKYERKQIVFAGTLSPLLTTFRLHLLYLFLQIRISPLKILLYDFQLRRNDSQILFY

SEQ ID NO: 115852 - protein, 175 aa, Gossypium hirsutum
  Clone ID: uC-gsflnu33B111e12b1.pep
LNLCKIHGHLELGDLCAELVNQLDASRLNDQSKAGLIPLKDSDLKKNEKKKLASQSPLEVSSRVNEYRAGDTSHPENDRIYALLRRLKEHMKEAGYVPETRFCLHDIDQESKEEALLAHSERLALANGLLTSPARGQIRIIKNLRVCGDCHAAFKIMSKIGGREIIMRDAKRFHH

SEQ ID NO: 115853 - protein, 80 aa, Gossypium hirsutum
  Clone ID: uC-gsflnu33B112h05b1.pep
PILQTVKILLYLSHQFIYLEANRKTQTSNRRAMALTNPFIHQTKEGKKGLKIQHKCPSYIEDYKHVYIYITTLLSYVHAV

SEQ ID NO: 115854 - protein, 135 aa, Gossypium hirsutum
  Clone ID: uC-gsflnu33B114d12b1.pep
FYRQPIDPSEGIKRVQQPVTIYSPVSPPQSSSDVSTSENNSNSHTFTTNTETNEDVSEIDENFWSEVLSADNSSMAADFRVVGSDQYFPSSPSPPLPALETVNGCGSNLYDTDANMDFWYNLFTRAADLPELPEF

SEQ ID NO: 115855 - protein, 84 aa, Gossypium hirsutum
  Clone ID: uC-gsflnu33B114g07b1.pep
IPTIISQPSPPNTLAPFGSSLCCLYHQSLQHGPPALCAPITTTVHLLLSSHRAPEQETVPRPEGVRAPHRETLSPTSLLFLWDA

SEQ ID NO: 115856 - protein, 75 aa, Gossypium hirsutum
  Clone ID: uC-gsflnu33B115b04b1.pep
DVSLGSWFIGLDVDHIDDRRLCCGTTDCEWKAQAGNICVASFDWTCSGICRSVDRMKDVHRRCGEGNNALRTATF

SEQ ID NO: 115857 - protein, 47 aa, Gossypium hirsutum
  Clone ID: uC-gsflnu33B115b05b1.pep
LLLLVQSDCTERAKRKAQMLLKLLRDSWPEDSIGNSDDFACSEIVPF

SEQ ID NO: 115858 - protein, 168 aa, Gossypium hirsutum
  Clone ID: uC-gsflnu33B115c10b1.pep
LEMASKKGSEEVSCVFERGTLCNFWVAPKFCKGLDKVELDEVCSFHGLVFAPPAPFPPFIVAADVAYAFFHYGDNIGSSCGFSFVIKENNLEPELKWIIAWKNGPCNDNKVYTNILPLSDDVDWDQIKCNLKSENCGPKSCCDLSGIKAEAFIEPGVKTPMKAKLIKQ

SEQ ID NO: 115859 - protein, 147 aa, Gossypium hirsutum
  Clone ID: uC-gsflnu33B115e11b1.pep
SRVRPRVRAEETKNPAHDIPIGLDGSMVITTAAYCSLAVALCLMQPFREINADAPFSVAFEAAGMSWAKYIVAAGALKGMTTVLLDGAVGQARYLTHIGRTHMMPPWFAHVHSKTGTPINATVVMPFRTAIIAFFTELDIVAHLLSN

SEQ ID NO: 115860 - protein, 168 aa, Gossypium hirsutum
  Clone ID: uC-gsflnu33B115f02b1.pep
FIFLGSKRNQQGFNAKSTPKILSFHDLLDIAGNVTEFPSVSVKQTDTAVLLYSSGTTGVSKGVVLTHGNFIASSLMVTKDQELAGDIHRVYLCILPMFHVFGLAVMVYAQVQMGNALVSMAKFDFEMFLRNVEKYKATHSWVVPPVVLAMAKQNVVDKFDLSSLSKLD

SEQ ID NO: 115861 - protein, 119 aa, Gossypium hirsutum
  Clone ID: uC-gsflnu33B115f06b1.pep
LFHDLGTDGNPDERRRYGDRRGPVRSFRSPYGVADSENFHLNAEGGPRSFRFCPEDDPELHERGNMREREFDRRIKNRPGNAPRRTRNLEEQEGNFRHGGQVWHDDGFDDMSQAKRKRF

SEQ ID NO: 115862 - protein, 87 aa, Gossypium hirsutum
  Clone ID: uC-gsflnu33B115g10b1.pep
SLFEETFFFQAMGTELEHCGINPIIESSESNSTEIRVNNMESIKETMQMHEDMFKHQVRELHRVYSVQKALMEELKKGIKSNRLWAT

SEQ ID NO: 115863 - protein, 122 aa, Gossypium hirsutum
  Clone ID: uC-gsflnu33B115h04b1.pep
SLMATAKPEVPATDQDTAEAEEPKPEPKPVKEKIPKTPQEKKPKQPTSTARPTYCHMIKEALMAAQENSGSSTDAIANYMEENHKEKLTANLRKILSLQLRNSADKGNLINIMVYYKLSYTG

SEQ ID NO: 115864 - protein, 105 aa, Gossypium hirsutum
  unsure (1)..(105): unsure at all Xaa locations
  Clone ID: uC-gsflnu33B126b01b1.pep
NALRLERRTLSKLMRKRFSEEERQKLYQKWGISLNSKQRRLQLVNQLWSNNKDIDHVTESATIVAKLIRFVEQGTXLKEWSGLTLTPPRPRRRSYGGKNRRVFLL

SEQ ID NO: 115865 - protein, 104 aa, Gossypium hirsutum
  Clone ID: uC-gsflnu33B126e04b1.pep
MSGGNGPKLELKLNLSPPRVNPTEESSTTAENSSSASSCVLSETNQMHEVDTSTDAAADVAAATPMMLVGCPRCLMYVMSENDDPKCPKCKSTVLLDFLPAIKN

SEQ ID NO: 115866 - protein, 93 aa, Gossypium hirsutum
  Clone ID: uC-gsflnu33B127b04b1.pep
FFFVRYVLRIVRLYKLLKVKKNKLYFSLVQSFRISSQVNWFNVFFWTDTLAGSNNHGFKSLHFVQLKFSPPSFISKILISLLFEFINLLSNYI

SEQ ID NO: 115867 - protein, 41 aa, Gossypium hirsutum
  Clone ID: uC-gsflnu33B127d09b1.pep
KGPPFLLFVYLSWFPFSSGHPFFFFFLFFFFFFFKSKLVFL

SEQ ID NO: 115868 - protein, 113 aa, Gossypium hirsutum
  Clone ID: uC-gsflnu33B129c09b1.pep
RSRVRPTTFPATLSLTDLSVTENNNSTENRISRPPSPKVNTSSYLIRPIPVLPVPPSSKMADLNLNQKAEEDRLPLSLKLSTPSADEQSTAAAHSSTLVVMSNGDNNSIISVA

SEQ ID NO: 115869 - protein, 122 aa, Gossypium hirsutum
  Clone ID: uC-gsflnu33B129e04b1.pep
METHRRSSTNSVRSHKPARPIALEDDSTKASDALPLPLYLTNAVFFTLFFSAVYFLLCRWREKIRSSTPLHVVTFSEIVAILASVASNIYLLGFSGIDFVQSLVLRPSADVWATEDDEVESE

SEQ ID NO: 115870 - protein, 140 aa, Gossypium hirsutum
  Clone ID: uC-gsflnu33B130a03b1.pep
MDSASGGSDNSIKEAIPATASALLSAASQQGGGGGSESSPSPAPPSRYESQNLLDWNTFLQYLTNHKPPLTLARCSGAHVIELLKYLDQLGKTKVHITDCPYFGHVNPPAPCACPLKQARGSLDSLIGRLRACYEENGGR

SEQ ID NO: 115871 - protein, 79 aa, Gossypium hirsutum
  Clone ID: uC-gsflnu33B130a12b1.pep
PSHGIRTASEELLKRSEWQKRFIFKDIRSDTYMHAYLVSSICYPQCNWFSLQCPIKNLEHSDYNSDHLLNPKGKKESKR

SEQ ID NO: 115872 - protein, 131 aa, Gossypium hirsutum
  unsure (1)..(131): unsure at all Xaa locations
  Clone ID: uC-gsflnu33B130g05b1.pep
MAPKKDKAPPSSYKPVQSAGGKQTKTKCCKGKQKDKANNMELIDQATYDKLIYEAAKYKLMTPYMLSERMRINGSLARKGIRELMARGMLRLETAHXSQQTYTRDTYTYMVRYVFAQFHDIVPYIDDTHSK

SEQ ID NO: 115873 - protein, 48 aa, Gossypium hirsutum
  Clone ID: uC-gsflnu33B130h01b1.pep
VNLIHILLLKYKKKTLQCPIRFTITNNVNGRYLYIIHLSSLKHATIPL

SEQ ID NO: 115874 - protein, 58 aa, Gossypium hirsutum
  Clone ID: uC-gsflnu33B131d01b1.pep
QEAHLKKERTHPSLTLKHGRETFLGFHEHQNEPIFSYKLHPFSTILPTLFGLMALNST

SEQ ID NO: 115875 - protein, 150 aa, Gossypium hirsutum
  unsure (1)..(150): unsure at all Xaa locations
  Clone ID: uC-gsflnu33B131g02b1.pep
SSRPAGSVFYVLYRPNRPSFTLASLRIHRLNLTTTXDSSSSHLSTLFNLTISSKNPNSHLSFSYDPFVVSCVSSNSDVFIGNGTLPAFVSNSKNETTFKGVAVTTSIDLDAETVNNLRPDLKKKNGILLKAQMDTKVTGKMGGLKSTKVG

SEQ ID NO: 115876 - protein, 45 aa, Gossypium hirsutum
  Clone ID: uC-gsflnu33B131g04b1.pep
LLSFTLQIIGSSTSLKARQRFITLSSDYICSFDVLVKRTRGRTRE

SEQ ID NO: 115877 - protein, 129 aa, Gossypium hirsutum
  Clone ID: uC-gsflnu33B131g08b1.pep
LLFLTGTVPSAAAAPDRFHKPFRLKSWDPKPQSQEFFELTNPLPSDHLTPSCSLTVINHSFANTIDSPPFSAPYSPPSDCSPPWPRVVLDFRADSSGDQYDRIAAIWLDGAEIFRTSTTEPTDTGISDA

SEQ ID NO: 115878 - protein, 141 aa, Gossypium hirsutum
  unsure (1)..(141): unsure at all Xaa locations
  Clone ID: uC-gsflnu33B131g10b1.pep
RIPWHEKLEGEEAIQNHVHELITIGNLEGAVSLLLSTSPESPYFYPNALRAVALSSAVSRSLLELAVKVVAANMVRTDRSLSGTHLLCAVGRYQEACSQLQDAGYWTDAATLAAAHLXGSDYARXVLQRWAEHVLHAEHNI

SEQ ID NO: 115879 - protein, 71 aa, Gossypium hirsutum
  Clone ID: uC-gsflnu33B131h08b1.pep
DAWADAWVLFSFFFNLRNPVLQIGSGFYSHITWFTTVSFISCPVSVAFCVPFCRCWRSKMEACCFGVNGGS

SEQ ID NO: 115880 - protein, 136 aa, Gossypium hirsutum
  unsure (1)..(136): unsure at all Xaa locations
  Clone ID: uC-gsflnu33B132e12b1.pep
FLTGDFLTRTANVFMDLGYSLNPSIDVGQVEGAFMHGLGWVALEELKWGDAAHKWIPPGCLYTCGPGSYKIPSFNDVPFKSNVSLLKGNPNVKAIHSSXAVGEPPFFMASSVFFAIKDSILAARAETGHTGWVPVD

SEQ ID NO: 115881 - protein, 46 aa, Gossypium hirsutum
  Clone ID: uC-gsflnu33B132h04b1.pep
YRTITTMENVCTYFITLKYGVISSTFYHVNYVNSGLLMTRFGSFYL

SEQ ID NO: 115882 - protein, 130 aa, Gossypium hirsutum
  Clone ID: uC-gsflnu33B133f01b1.pep
PSCPLDLRAEIESREKAGREAHEAKLRMAAMVQAEQARAESQAHAELMARGPIRANALGSQGNNLAIGHDIREQPQGVNPDEMMNGWGSSAQRDEKEPSEDFLNDEETENGDTSVQNDWREVGEFDLNST

SEQ ID NO: 115883 - protein, 91 aa, Gossypium hirsutum
  Clone ID: uC-gsflnu33B134e11b1.pep
IYYTTIIVSQGLLLGIGAKNKLHYYIIGELYMEECYYMYLIKEKISMGAHLGRGVQEGKGIVGKWKWEVWWWRFVLFVEVFYFLYFINDVI

SEQ ID NO: 115884 - protein, 88 aa, Gossypium hirsutum
  unsure (1)..(88): unsure at all Xaa locations
  Clone ID: uC-gsflnu33B134g11b1.pep
KVNTKWGXEGTLEYISDLLSSMKKKKKKKQTQTVALKIRMDCEGCARKVKKVLSGVKGAKSGDVDLKQQKATVTGNVEPKKVLAAAQT

SEQ ID NO: 115885 - protein, 92 aa, Gossypium hirsutum
  Clone ID: uC-gsflnu33B135c09b1.pep
LPASFLEGNSGLCGPGLPNPCSDEHPKHHSSGLTTLTCALISIAFAMAMVIVAAGVFVFHRFSKRKSQPGVWRSVFFYPLRLTEHDLVMGMD

SEQ ID NO: 115886 - protein, 48 aa, Gossypium hirsutum
  Clone ID: uC-gsflnu33B136c11b1.pep
RSTQLIKPANMPYLQKLVRENVLRNDHQPRQGSPQSSKDPLELHHTER

SEQ ID NO: 115887 - protein, 68 aa, Gossypium hirsutum
  Clone ID: uC-gsflnu33B136f05b1.pep
QYNFFFLVTYSIFFKLQLRLHHLNIISLVAIITLWMLIHPEAVNNRYTRKYNSHLTNLHPNIVRQKHN

SEQ ID NO: 115888 - protein, 104 aa, Gossypium hirsutum
  Clone ID: uC-gsflnu33B136g05b1.pep
KMLDSFIHLLLPNYKGLIQSPRHLSDYIGKKLFQNAFAVPRSTYNSYFFYLLFPNHFWFFKNCVMSQASENWQSTYVIPWKAAPTFMTASSFLKKHFASFPILD

SEQ ID NO: 115889 - protein, 131 aa, Gossypium hirsutum
  Clone ID: uC-gsflnu33B137a04b1.pep
NHLYFSAIKPNQKPIGFYTQTIKQSKKEQTKKVESRSLIFYFLVSLFLFSVLQSFFKKKNIKEKRKEGLTREPRSRVFGVPIPSLKSIFGGGKRRSLLSCYWAKKIRPSGAPKLGSKLPFARPPPTVASRR

SEQ ID NO: 115890 - protein, 46 aa, Gossypium hirsutum
  Clone ID: uC-gsflnu33B137a11b1.pep
YLSTRPCSLKAPDIGIVRNIDFDSLFFTYLICSNTNSLGSICYCAE

SEQ ID NO: 115891 - protein, 93 aa, Gossypium hirsutum
  Clone ID: uC-gsflnu33B137c07b1.pep
ADGKLKKAAVVIDKKSGRVMELFTNQAGVQFYTANFLKDVRGKGGYVYESHGALCLETQAFSDSVNHTNFPSDIVYPGKEYKHVMAFKFTFSS

SEQ ID NO: 115892 - protein, 119 aa, Gossypium hirsutum
  unsure (1)..(119): unsure at all Xaa locations
  Clone ID: uC-gsflnu33B137d04b1.pep
MQQNSRFVLLSLSLLFLPFIFSNAEKGHLFGGWTPIKDIKDPHVMEIAEFAVDEYNKQSNSSLILQKVVKGETQVVAGINYRLVLKAKNGSMAKKYQAVVWXKSWLNFRKLTSFTLVKG

SEQ ID NO: 115893 - protein, 137 aa, Gossypium hirsutum
  Clone ID: uC-gsflnu33B137g07b1.pep
VGIWSCGLGRKRKTHAKKTVLYRNVQSPFAAEALAGLQVIQLGCEMDCPLVTVIGDSRTIIKKCQEMKRDKSVTGAIINDIHSKMTRFEDLRFQFIHRTENIFAHKIAEEALKKEEETYLIKGRGGSPKGWWRKDLD

SEQ ID NO: 115894 - protein, 105 aa, Gossypium hirsutum
  Clone ID: uC-gsflnu33B138h10b1.pep
LYPQHVTPDYWVFRIPGKISDENSAPYRYRYAFIGPLVYCSYLSAHREEEKQRYLAAFLLRAQPNTSLSDFITLIKGSLAKIRGCYENLYYRNWDDSFKRPRQFI

SEQ ID NO: 115895 - protein, 86 aa, Gossypium hirsutum
  Clone ID: uC-gsflnu33B140d05b1.pep
QILYGCLNNVYRKPIWLHCINGSILSRIRFLQHPKKSANFSLKVNDRNKLKRNQRKNRERNCLFRTSSWRHFFALLRKKKTMEKGS

SEQ ID NO: 115896 - protein, 49 aa, Gossypium hirsutum
  Clone ID: uC-gsflnu33B140e11b1.pep
SLKIRFTGFRIYLLHRIQFRPDKTMAASRRLRDLQSQPGNKTCDHSNQK

SEQ ID NO: 115897 - protein, 146 aa, Gossypium hirsutum
  unsure (1)..(146): unsure at all Xaa locations
  Clone ID: uC-gsflnu33B140e12b1.pep
SPTPIRPLRGGVAMPLSFDHKPDRPDELERVEAAGGRVINWNGYRVLGVLATSRSIGDQYLKPFVICKPEVTVREVTNGDEFLILASDGLWDVVSNEVACRVVRRCLNGLIRSTTADVLNYNRATEVSAVLXELSLSRGSYDIISV

SEQ ID NO: 115898 - protein, 53 aa, Gossypium hirsutum
  Clone ID: uC-gsflnu33B141a08b1.pep
DNFFLLLMVEFRRRRLVAAILDVFTLRVYLECLQFRFSVGSIIPSLKFHVNIV

SEQ ID NO: 115899 - protein, 73 aa, Gossypium hirsutum
  Clone ID: uC-gsflnu33B141b11b1.pep
RILIMEPIVINHFETRSIWRRGFDLIMGQIIFQLLGTLLLLCQLYCSRYNNTVPTTLRQSIFPSEEIPLIGDR

SEQ ID NO: 115900 - protein, 49 aa, Gossypium hirsutum
  unsure (1)..(49): unsure at all Xaa locations
  Clone ID: uC-gsflnu33B141f04b1.pep
NNHPYHLNMYNHLPRIILSFNQRITGCFVNMIYFQKGPVWVLRSGRVTX

SEQ ID NO: 115901 - protein, 109 aa, Gossypium hirsutum
  unsure (1)..(109): unsure at all Xaa locations
  Clone ID: uC-gsflnu33B141h04b1.pep
FTRPEINGIWLYVSHELAXVANLFSRILTAYSKVPQKSKATSTKGEFEELEAVSTMAIMDGPLEPSSSTAPSVADVPDDPAFVNFFSTAMTIGNASKTSNFGLPYQCFD

SEQ ID NO: 115902 - protein, 50 aa, Gossypium hirsutum
  unsure (1)..(50): unsure at all Xaa locations
  Clone ID: uC-gsflnu33B142a11b1.pep
MEAVHQVGNRKRGGESIGLLKYQAPFGSNPRHAYXHCHTLTSWIFLGNRF

SEQ ID NO: 115903 - protein, 128 aa, Gossypium hirsutum
  unsure (1)..(128): unsure at all Xaa locations
  Clone ID: uC-gsflnu33B142b07b1.pep
MGIKILNPWWFRLLRNHFSCLHRHLHHHHHHHHEPPRTIKVINCDGVVKIYDRPVHVSELLIEFPKHMICRSDSFYIGQKIPPLSMDDXLHFGHDYFLLPSQAFQSALSFVTIASFANARYSSSRESG

SEQ ID NO: 115904 - protein, 51 aa, Gossypium hirsutum
  unsure (1)..(51): unsure at all Xaa locations
  Clone ID: uC-gsflnu33B142d11b1.pep
TQAGGTEVPYVRCHNAQTETPRFVNITKTAQLRMRRSLDVLQGYVISLVXV

SEQ ID NO: 115905 - protein, 93 aa, Gossypium hirsutum
  Clone ID: uC-gsflnu33B142g02b1.pep
VHPLSATIMCEYSNKKTRGAFIAAVFAMQGFGILTGGIVALIVSASFDHAYKAPPYSVNPKDSTAPEADYIWRIILMFGACSALLTYYWRMKM

SEQ ID NO: 115906 - protein, 62 aa, Gossypium hirsutum
  Clone ID: uC-gsflnu33B142g09b1.pep
NIQKEKLKNSAVTSINFKSKNTSFRYQATCQLVNITKIQNLNKKVASGSIFKQTCCCCSRCW

SEQ ID NO: 115907 - protein, 118 aa, Gossypium hirsutum
  Clone ID: uC-gsflnu33B143a09b1.pep
LRVRPRVRTAGHKKNQTENHVAAVENGVSGRIFLKKRRGAAKTEDDGLQCCSETGAGIVRRKSPVIYECLSMERTDLYLDPAYYSSCSSGITQVSDDNADDDEESNSCTSYPYFRRKP

SEQ ID NO: 115908 - protein, 63 aa, Gossypium hirsutum
  unsure (1)..(63): unsure at all Xaa locations
  Clone ID: uC-gsflnu33B143e12b1.pep
FCSFKKAPPFFFFFFIFIFFFFFFFIFFFFYFLFFFFFFFFFFFFFFFFFXFIIGYYEHLRIN

SEQ ID NO: 115909 - protein, 91 aa, Gossypium hirsutum
  Clone ID: uC-gsflnu33B143f06b1.pep
MTSLHQSAPFYITIGDGGNHDGPAIGMVEPQPSFSAYREASFGHGIFDIKNRTHAYFSWHRNQDGYAVEADSFWFHNSYWNPLGKSFVAQY

SEQ ID NO: 115910 - protein, 55 aa, Gossypium hirsutum
  Clone ID: uC-gsflnu33B144a09b1.pep
FLFFFFFFFFFFFFFFFFFFFFFIQRQPHFSGSLDPYKSHFKASKEYSSNTNALQ

SEQ ID NO: 115911 - protein, 155 aa, Gossypium hirsutum
  Clone ID: uC-gsflnu33B144c11b1.pep
PRVRPRVRSKYRLGYGVDGAEEKSSSSSYVSRLESKYKPGYGVDKDEYMQSPSRIDHHNLENDRDDDIGSEDVGVFTIDDVHAFNVGRKLSTFFFIRNNSLYPGFLPKELADSISFSSSEIPKILKFFSIPAASQKAKVVKDTIRKCELEPVKGE

SEQ ID NO: 115912 - protein, 64 aa, Gossypium hirsutum
  Clone ID: uC-gsflnu33B144d08b1.pep
MADAEHNYVFNVSMSCGGCSGAVERVLKKLEGVKSYEVSLDTQTAKVVADESLPYEKVLKTIAK

SEQ ID NO: 115913 - protein, 125 aa, Gossypium hirsutum
  Clone ID: uC-gsflnu33B144g12b1.pep
MDSSDFTESMLDQLPMERFWDIPLYQWDGFWYRSYHLQATMALRSQYIARDDDIILASPMKTGTTWLKALCFSILQKDGNAARLNGETVGKTEEDDPRHIRDPLVDNHPAVYVQTLEVQVFTAKP

SEQ ID NO: 115914 - protein, 88 aa, Gossypium hirsutum
  Clone ID: uC-gsflnu33B145f04b1.pep
MDDWQEWNYGHLLTTMPLLCSLKINSCLKLKSLPRHLLQKTTLQVLDIFDCPILTERYSRNGTGEDWHYISHIPTITIDGEDVKRDGN

SEQ ID NO: 115915 - protein, 124 aa, Gossypium hirsutum
  unsure (1)..(124): unsure at all Xaa locations
  Clone ID: uC-gsflnu33B145g12b1.pep
LLTARDNERPRGSNWTGEEADEAXKGTSATRDAPVTGGTDTDAKVESDLTAGFNAPEGKYXDPNNLTASGCSATAQLISLLPLHVSSVYSDEPSTITAAAGAKGPLAPPDNVMRTKGALGWKGS

SEQ ID NO: 115916 - protein, 72 aa, Gossypium hirsutum
  Clone ID: uC-gsflnu33B146a03b1.pep
FFCRCRDYVCFGFWGSCRYTRREDTNVASGVIGGFARDRRRVFGDGFDGGDGFVEQLHASFGICYGKCLILI

SEQ ID NO: 115917 - protein, 151 aa, Gossypium hirsutum
  unsure (1)..(151): unsure at all Xaa locations
  Clone ID: uC-gsflnu33B146f12b1.pep
VIFMGKVRGDRVKFDPDRIVMSGGATGAHEMVAFCLADPGEALLVPTPYYPGFDRDLRWRTGVELAPVICESSHNFQITRTAMEAVYVKAQEANLKVKGLVITNSLNPFGTLXDRETLKSIVQFINDKNYYLIXWQFYSGTVLKTLNFVVF

SEQ ID NO: 115918 - protein, 168 aa, Gossypium hirsutum
  unsure (1)..(168): unsure at all Xaa locations
  Clone ID: uC-gsflnu33B146g04b1.pep
FGYRLQELISESLGLEKDYIKKVLGEQGQHMAVNYYPPCPEPELTYGLPGHTDPNALTILLQDLQVAGLQVLKDGKWLAVNPQPNAFVINIGDQLQALSNGTYKSVWHRAIVNADKPRMSVASFLCPYDHALISPAKPFTQYGCGAVYRDFTYAEYYSKFWXRNLDQE

SEQ ID NO: 115919 - protein, 47 aa, Gossypium hirsutum
  Clone ID: uC-gsflnu33B146h08b1.pep
HASAHASGEKPLPCPCISHELWSPLGFLLLGLGVLNCPSSFLPLSLN

SEQ ID NO: 115920 - protein, 32 aa, Gossypium hirsutum
  Clone ID: uC-gsronu33B002a05b1.pep
TIKSRLLKIFEPVFNRWCCFHIIFSPSLNSSI

SEQ ID NO: 115921 - protein, 78 aa, Gossypium hirsutum
  Clone ID: uC-gsronu33B002b03b1.pep
VCPSQERDGDYGHRSYSAGYENADGNGYGEKSAIEPENSRAAWRRSPCRSSRSPGRYSRSPSGSRSRSADLHVGIADK

SEQ ID NO: 115922 - protein, 110 aa, Gossypium hirsutum
  Clone ID: uC-gsronu33B002c07b1.pep
FFPSESLKQFCGSSRNVLVFASLSLTISVCPHSVCDHRLSPSCEVCLKHLTYKLQVRCVISCFQPSKKCIMKVVKCTIRAYPSVQRRLCLRVSLVPRRALQRIVGSPRRW

SEQ ID NO: 115923 - protein, 150 aa, Gossypium hirsutum
  Clone ID: uC-gsronu33B002d07b1.pep
MLDDLGGTFASHQVEMAIYAKELLKRFHVSIEQTKEISDYTSGILDKLSEDTMRVDNHAVEADEIQMKSIAGFQNAYQEQSKFDAKKLIADMTNLVYSHVRRQKELVDARLADLKESAVANKTFLDGHVSSIEGITTDAKRKWQAFFMHA

SEQ ID NO: 115924 - protein, 70 aa, Gossypium hirsutum
  Clone ID: uC-gsronu33B002d08b1.pep
PRKDIKQTINNGVGDQLGHCLESACGRVPNSNSFGNREIVVHFQLDIISLSKKYLPKVAPEPILREFPLT

SEQ ID NO: 115925 - protein, 158 aa, Gossypium hirsutum
  Clone ID: uC-gsronu33B002e10b1.pep
FFVGVDELPGPATTQHGSQRDHSFPFLESLNEVLETNRVEESQSHVHRMYFMGPNTFSEPWHLPHTPPEEIKEIVYEGAYNTFVDEINAIAAYQWWEGAIYSILSILAYPVALSWQQWRRTMRLQRLREFVRSEYDHACLRSCRSRALYEGLKVSATT

SEQ ID NO: 115926 - protein, 85 aa, Gossypium hirsutum
  Clone ID: uC-gsronu33B002f03b1.pep
GFVYGGVEGWVDAAVIANKISRCLAIDAVTSTAQHSAVRVDSSLGATSERTPGSMPGKEVEEGSQLEPLIHFSRAPPFRPQNQPY

SEQ ID NO: 115927 - protein, 139 aa, Gossypium hirsutum
  unsure (1)..(139): unsure at all Xaa locations
  Clone ID: uC-gsronu33B002g01b1.pep
DSHHHGLDLVNAANSGELGARRPRGRPPGSKNKPKPPVIITRESANTLRAHILEVGKGCDVFDCIANYARRRQRGICILSGSGTXVTNVSIRQPSAAGAVVNLHGRFEILSLSGSFLPPPAPPGATSLTIFLAGGQARL

SEQ ID NO: 115928 - protein, 147 aa, Gossypium hirsutum
  Clone ID: uC-gsronu33B004b02b1.pep
PTRSVSRYFWDGSRVRLLRVDGDGVDGGGSGVPFCFDLDKVVEASSLAIRNFFIPKQVSENYIGYVKWKFLHRVFSSALQVLATQAMFRAIGIGYSRSLTSAAALNWVLKDGLGRLSRCIYTGSLASAFDTNLKRVRVTTSMLFTFS

SEQ ID NO: 115929 - protein, 113 aa, Gossypium hirsutum
  Clone ID: uC-gsronu33B004b12b1.pep
MAVAFTHLSWGLWSGKHQEPRIANGSSLSSSPDAGLLDSDNLKFPLVKRANMASSSRKVRRKWHIREERKIDREYDVVIVPSDGGCVSGSESDGSDYSIGWRNLMAWFNSDDE

SEQ ID NO: 115930 - protein, 37 aa, Gossypium hirsutum
  Clone ID: uC-gsronu33B004c08b1.pep
SLKLNPLLPICLFNFLSMNMICWNGHSALLLNFSIGC

SEQ ID NO: 115931 - protein, 75 aa, Gossypium hirsutum
  Clone ID: uC-gsronu33B004d04b1.pep
TYFNDSFELRCVGYGYGYVLVLLLTRLSFPLFFVCFSFLFIFLSFLFFLYSSLLLFFLFTLSFLFSYLFLIIPSF

SEQ ID NO: 115932 - protein, 117 aa, Gossypium hirsutum
  unsure (1)..(117): unsure at all Xaa locations
  Clone ID: uC-gsronu33B004e10b1.pep
SGVQSVKYYLSEHPCIVNFRWSNTQTFGSTWSFLFSSISIYVFAATTLHSLLSHILPKRRGVPLGPIPAIHSLCISLIFAVIFTGILLSSVADIRDTRWFWRRTKTXTTPFQWCLCF

SEQ ID NO: 115933 - protein, 157 aa, Gossypium hirsutum
  Clone ID: uC-gsronu33B007b02b1.pep
VAWVKFKSDLSKAFDEATTFLNSIQMQLSHLCNGSSEEDLSGGEMVPHDYHKNGDPQLKDKLLEKYSGYISTLKHEFSKHKKKGKLPRDARQILLHWWDLHYTWPYPTEADKAGLAEATGLDQKQINNWFINQRKRHWKPSENMQIAIMDNVYGPFS

SEQ ID NO: 115934 - protein, 204 aa, Gossypium hirsutum
  unsure (1)..(204): unsure at all Xaa locations
  Clone ID: uC-gsronu33B008b10b1.pep
QCFSDGGCSPRYLIIDDGWQDTVNEFYKEGEPLIEGTQFATRLVDIKENSKFKSSESEAGCNKLHEFINMIKGKYGLKYVYVWHALXXYWGGVLPSSETMKKYNPKIVYPIQSPGNIGNLRDIIPDSLEKYGVGIIDPQKIFDFYNDLHSYLSSNGVDGVKVDAQNLIETLGSGFXXRVSLTRRYQQALEQSTSRNFKDNKSDM

SEQ ID NO: 115935 - protein, 149 aa, Gossypium hirsutum
  unsure (1)..(149): unsure at all Xaa locations
  Clone ID: uC-gsronu33B008b12b1.pep
PTRPVENMEPEKVILYPQLFWGCVAMMHTDFVHVYCQVLELFSRVIDRLSFWDRTIENVLLSSMPRDELDSSDIGDLQRMEFKGYDLPVTSGNLPAFEGVQPLVLKGLMSTVSHGVAIEVLSRITVHSCDSIFXDRETRLLMHITGLLP

SEQ ID NO: 115936 - protein, 114 aa, Gossypium hirsutum
  Clone ID: uC-gsronu33B012a10b1.pep
NGITQPLLLNTEPKQGENGDQEYDDGEEESCEKTRKPVTSILSAYRLLTPSVKVQLLVYFMLKYAMEILLAEASVITAYYFIWSTNSVAIFLACLGLTVLSVNIIVGTYIRNMF

SEQ ID NO: 115937 - protein, 170 aa, Gossypium hirsutum
  Clone ID: uC-gsronu33B012b08b1.pep
EFNPSSIPHSILKRHIHDQYHEWLHPSSKLTAGNGDIPHKFNTISHSYFGFYADQFWPKGQPVIPKLIHRWLSPIVLAYWYMYGGYRTSAGDILLKLKGSSEGVKKVVKALKSKSLNCRVKRKGRVFWIGFLGQIHVVLELVEPYVLDDLKDFLKQAAKPLMNVRSNLET

SEQ ID NO: 115938 - protein, 101 aa, Gossypium hirsutum
  Clone ID: uC-gsronu33B012b11b1.pep
ENLKGAENPSLSHVFPHFLNTPIWGKVRGKNKYLFKKCNFYNKYLFKKCIFYTLLILMTFVYFEFSPNHALKFLSFFNTLLPCCKWLYYFLNYFLFFYLLF

SEQ ID NO: 115939 - protein, 176 aa, Gossypium hirsutum
  unsure (1)..(176): unsure at all Xaa locations
  Clone ID: uC-gsronu33B012c04b1.pep
PTRSVKFENLASIHSLKIKYEQCLENCGTKMDVNAPDPXKRIDERALEKEEEDYFNEDRDEDDTTSASHPRKVQPQPVSSNGLXANRSSLSPRSGGLVDYEDDEDDEDYKPPPPRKQTETSEEDEGTXESIRSKRKLNPKEKEHELSKKQRLGKSPKSRDSVFAALCSTLSQAVLP

SEQ ID NO: 115940 - protein, 84 aa, Gossypium hirsutum
  Clone ID: uC-gsronu33B012d08b1.pep
SIIEYLILSLFLAQSSNYKKLCKTSTLEVLNRIEKLFAQTLFASQIFSFIKSYDHIHVRTSTQYKLNNNYYNTTDILGYKTPYK

SEQ ID NO: 115941 - protein, 48 aa, Gossypium hirsutum
  Clone ID: uC-gsronu33B012e05b1.pep
FSLYELTKHVMLTPFIFPLFIVFGSSRRWRSLEHCYTITSHLSILRKS

SEQ ID NO: 115942 - protein, 109 aa, Gossypium hirsutum
  Clone ID: uC-gsronu33B012f04b1.pep
MSQGFSIELYFDPALENQVLKAWNVLARRQISTQLIEIESRPHITLFSSPFLDPAKLESVIKSFASKQEPLPISFSSIGALPNENNVLFLSPAPTMTLLQFQAQVCEAI

SEQ ID NO: 115943 - protein, 100 aa, Gossypium hirsutum
  unsure (1)..(100): unsure at all Xaa locations
  Clone ID: uC-gsronu33B014g11b1.pep
SVHYAGGISLAYPPVLTGXLICSTEGPAGDSLNPINPIEKLEGAHQHKRELRYYNSEMHKAAFSLPSFLKREEATLRLAGICVSPSPKQICSDNSHLAVE

SEQ ID NO: 115944 - protein, 185 aa, Gossypium hirsutum
  unsure (1)..(185): unsure at all Xaa locations
  Clone ID: uC-gsronu33B015a07b1.pep
MTGLVMMTKGGGCGGGGKGGTKGRGGGLKSCEEEEERQNQISVVAFLLAALRKSMVSCRVDRRDEVMSSSTVHHMEIGWPTNVKHITHVTFDRFNGFLGLPVEFQVEIPGRVPSASASVFGVSAESMQCSFDSKGNSVPTILLLMQERLYLQGGLKAEGNFPINPXNSQEEHGRDQLNRGIVPDN

SEQ ID NO: 115945 - protein, 174 aa, Gossypium hirsutum
  Clone ID: uC-gsronu33B015f03b1.pep
PTRSVFFTIRWWNPVTFEDMQPEGTSHRISWPYVEDKAYLWTWLFGVPLAAYTLWQVLYFLIVNVLRRQRLLRDPEVMTSYRELSKKAKKANNIWWRLGGLLGDQNRFLMYILCQAIFTVATMALTVSIFLSYKFHVIFQILKVSASVWNGGSFLLEVMPRQVIGEEKKKSDIQ

SEQ ID NO: 115946 - protein, 170 aa, Gossypium hirsutum
  unsure (1)..(170): unsure at all Xaa locations
  Clone ID: uC-gsronu33B015f07b1.pep
VLSFEKLRQVRRNLDQAKTLLEALIKREEKKRDVLECEVSLQRIQMKYKHETELLEDITLPGFPPISSKFASSEDEFMDSDDLANSRPRARPAAVQNPPLTDSNVGMAPTASVKQEFRRRHLLHGWLHKLDPLEPVLLFTKPLVPDKLAAXNIVPPSDTSTKNGASTPPY

SEQ ID NO: 115947 - protein, 49 aa, Gossypium hirsutum
  Clone ID: uC-gsronu33B016c10b1.pep
YIFDIRYNACKPSQSIRSHHRRVFKAVWHHSLPLLISISSDLQIGLHKM

SEQ ID NO: 115948 - protein, 127 aa, Gossypium hirsutum
  unsure (1)..(127): unsure at all Xaa locations
  Clone ID: uC-gsronu33B017a04b1.pep
PRVRAGAIPPLIQILEGKVREADEAVVNAXGKLLQDEIWENGSDYIAKNAGVEAIIKIMETASVKAQEKALWILERVFGVEELRVKYGESAQVVLIDLAQKGDPRLKSTTAKLLAQLELLQFQSSYF

SEQ ID NO: 115949 - protein, 172 aa, Gossypium hirsutum
  Clone ID: uC-gsronu33B017b01b1.pep
ISLFGGARPRELVLKERGIDDRNHEPVQHVDRVKHNVTRTEKAADHAYGERVENPPVDQRGGRKSERNHRVDNGRVDMQRRNWRNENRRNGRETERPQQAPPVKERQPSPETWRKPVENTNPVSAQVAGVRYGKVTSALELAQSLLKSFFDQKKMTIWWARCTPGRPNAISR

SEQ ID NO: 115950 - protein, 81 aa, Gossypium hirsutum
  Clone ID: uC-gsronu33B017c03b1.pep
GAVTRSNCPRDNAYLLSLFDCSLSLCSIILETDANVIAGKVASHSMDAGAPLSEQVLRSLYPKQAMLNSLPLFQSSSNFPP

SEQ ID NO: 115951 - protein, 152 aa, Gossypium hirsutum
  Clone ID: uC-gsronu33B017e03b1.pep
GIPSYGRGHGTRETCALHTARLSCDTLVDFWSALGEETRQSLLRMKEEDFIERLMYRFDSKRFCRDCRRNVIREFKELKELKRMRREPRCTSWFCVADTAFLYEVSDDSVQADWRQTFADTVGTYHHFEWAAGTGEGKSDIMEFENVGMNGT

SEQ ID NO: 115952 - protein, 107 aa, Gossypium hirsutum
  Clone ID: uC-gsronu33B017f10b1.pep
KKKIVERPLRHALHMLVKPFLAQPTFYMDSNPAWWIHLKSTHKHSTLNTNFYFHAQKRIPPIIQRLKYHPAQHKKLTVVDAPWKALPLCKSNLMHPIRSLITNKTFI

SEQ ID NO: 115953 - protein, 45 aa, Gossypium hirsutum
  Clone ID: uC-gsronu33B018h09b1.pep
QLQALNRFLLSIALFFSVCLPYFALQVIYLHFSLQSCRIRVLFSQ

SEQ ID NO: 115954 - protein, 89 aa, Gossypium hirsutum
  Clone ID: uC-gsronu33B019a11b1.pep
FKEKRGIFLSGEDPEPAKGSGQPPPWLRRAPQPPAVAGHCTRWPEFRKRQTVVEQRPLAGVGGGWRGGHVLTARVSLASSFGFFFNVMG

SEQ ID NO: 115955 - protein, 133 aa, Gossypium hirsutum
  Clone ID: uC-gsronu33B019b07b1.pep
FNAEHPQIIFDNILNRKIPWPRAPEEMSLEAKDLIDGLLTEDPNQRLGAKGASEVKQHVFFKDINWDTLARQKAAFVPSSDSALDTSYFTSRYSWNTSNDHTYPGSDFDDSSDADSLSGSSSCMSNRQDEVID

SEQ ID NO: 115956 - protein, 157 aa, Gossypium hirsutum
  Clone ID: uC-gsronu33B019d04b1.pep
CNSLPEKTANFADENFSVSVSKSANEVVATYTKDETGMDLIIRLPASYPLRPVDVDCMRSLGISEVKQRKWLMSMMMFVRNQNGALAEAIRVWKRNFDKEFEGVEECPICYSVIHTVNHSLPRLACKTCKHKFHAAGLYKWFSTFYKSSCPLCQSPF

SEQ ID NO: 115957 - protein, 46 aa, Gossypium hirsutum
  unsure (1)..(46): unsure at all Xaa locations
  Clone ID: uC-gsronu33B019e04b1.pep
TFHFVLGFFLFVGHLWHAGXARAAAAGFEKGIDRDFEPVLSMTPLN

SEQ ID NO: 115958 - protein, 49 aa, Gossypium hirsutum
  Clone ID: uC-gsronu33B019g09b1.pep
VCYKSLSIKVAHFLHINACYDCQVNCLTLCCWIFHMLTLSIIANEFPNI

SEQ ID NO: 115959 - protein, 98 aa, Gossypium hirsutum
  Clone ID: uC-gsronu33B021a12b1.pep
MTIDIETTAEQGGGAELSAKDYQDPPPAPLIDLEELTKWPLYRAAIAEDIATLLFLYVTGETEIGYKAQTDPGKNTGDPDWGGGGILGIGWANGGKIF

SEQ ID NO: 115960 - protein, 103 aa, Gossypium hirsutum
  Clone ID: uC-gsronu33B021d06b1.pep
LASAHASENGGFDCVVSGDATLLRATISFSLPHLNCLVYPFCDSSVSRLIPTSIRSALDCPLNYARSYLANLLPSCGHRVEYPDSDLGLIDDRAKLAEPHWET

SEQ ID NO: 115961 - protein, 96 aa, Gossypium hirsutum
  Clone ID: uC-gsronu33B021e10b1.pep
IAMYSLPSLSHILPKFCFSYLPAGCGEGNRELCFLQQFVIVQYKQFGPHVCMSKLKSRVSRYQNNIRVWLKSRFGFFPLIPEQQVLADPASQTLLQ

SEQ ID NO: 115962 - protein, 62 aa, Gossypium hirsutum
  Clone ID: uC-gsronu33B021e11b1.pep
AEARKACCGTGLLETSILCNPKSIGTCANASEYVFWDGFHPSEAANKILADDLLSSGISLIS

SEQ ID NO: 115963 - protein, 165 aa, Gossypium hirsutum
  unsure (1)..(165): unsure at all Xaa locations
  Clone ID: uC-gsronu33B021f02b1.pep
FIVGRQMAETGVDPXISNTLAAPDKYKCSDEVISIAAMLSVGNSIFYRPKDEQVRADHARMSFHTSNVGDHIALMNVYNSWRETNYSTQWCYENYVQVRSMRRARDIRDQLEGLLERVEIELTGCPNDLQAIKKAIISGIFSHSAQLQNYGSYPTGKHPRIVHIH

SEQ ID NO: 115964 - protein, 91 aa, Gossypium hirsutum
  unsure (1)..(91): unsure at all Xaa locations
  Clone ID: uC-gsronu33B027b09b1.pep
NAAISPYERTMTEAYWSPDFLTQTKEPNPPCEGELLQHTRKGVLRWKRVNVYINKKSQVMIKLKSKHVXGAFSKNNKCKYCITLPSNFALI

SEQ ID NO: 115965 - protein, 76 aa, Gossypium hirsutum
  unsure (1)..(76): unsure at all Xaa locations
  Clone ID: uC-gsronu33B027d03b1.pep
MLGSQTQELNRGSFPSSSAHGNNGVRSSKPDQPTSVAKNPKKRTRASRRAPTTVLTTDTTNFXAMVQEFTGIPAPP

SEQ ID NO: 115966 - protein, 163 aa, Gossypium hirsutum
  unsure (1)..(163): unsure at all Xaa locations
  Clone ID: uC-gsronu33B027f11b1.pep
NTVPVPRHWSQKRKYLQGKRGIEKQPFQLPDFIAATGIEKIRQAYIEKEDSKKLKQKQRERMQPKMGKMDIDYQVLHDAFFKYQTKPKLTTHGDLYYEGKEFEVKLRXMKPGSLSHELKEALGMPEGAPPPWLINMQRYGPPPSYPHLKIPGLNAPIPPGAAL

SEQ ID NO: 115967 - protein, 61 aa, Gossypium hirsutum
  Clone ID: uC-gsronu33B028h03b1.pep
IFRALGNHGSNVTEEELETHTISAWKEGKVYLGRQIDGNARSYPRCLVQAGPYDSLKNMML

SEQ ID NO: 115968 - protein, 121 aa, Gossypium hirsutum
  Clone ID: uC-gsronu33B029a06b1.pep
GTSLSDPPVRVVFGVEPVVGCLQGVELEEASVQRVETLTSGEFTETVRVNATVKILEEFLRQKDDGVVEILSSKSVEANNDKGSNPKTTMNADMGRSLKPKQWLNSPIVKANYGDNDMNFG

SEQ ID NO: 115969 - protein, 103 aa, Gossypium hirsutum
  Clone ID: uC-gsronu33B029d07b1.pep
DSQPKLIRGKATRIRAICLFFKSWRTAYIFNDAFFISVPLEDSLLLLFIFVSLYCYLFFSFSFISYFIFNFLFFLFFILFSYSLFSLFLPIFFIIITFYYFFL

SEQ ID NO: 115970 - protein, 162 aa, Gossypium hirsutum
  Clone ID: uC-gsronu33B031a07b1.pep
LISRPVAIITALHPSHAQAAVICAKRHGFQLRIRSGGHDYEGLSYISDVPFVILDMFNLKSIDIDMKTETAWVQAGATTGELYYSIAQKSDVHGFPSGVCTTLGIGGHFSGGGWGFLMRKYGLSIDNVIDAQLIDANGRILDRKSMGEDVFWAIRGRGTTSF

SEQ ID NO: 115971 - protein, 45 aa, Gossypium hirsutum
  Clone ID: uC-gsronu33B032b11b1.pep
ISLELNLVQLLKTYDYIEHKRDHGTLSQTVPQLILTNEPSPVRLL

SEQ ID NO: 115972 - protein, 145 aa, Gossypium hirsutum
  unsure (1)..(145): unsure at all Xaa locations
  Clone ID: uC-gsronu33B032d04b1.pep
HHFYSQSDESSEHFFVPVSSFNFYHGGPENKVGSIRSKKLFSTQKDNSLLDSRASDGRIRSNYDDVSHMLNKLDSLNDYDPVNVFLSAAASSSSASDGQRSFFDLEEAQXQVFSPFFLMDASLLFDSYEDLLAPLLDTDTDLMEH

SEQ ID NO: 115973 - protein, 198 aa, Gossypium hirsutum
  unsure (1)..(198): unsure at all Xaa locations
  Clone ID: uC-gsronu33B032e11b1.pep
FFTLVLLLFFNIFIFSFVIAIFYLFIYLFLFIXFLYLFNFYLVLLNLFFXVHIFIIFIIYTFIYFFVFFNSSFLLLFIDFFLFFLLNFFIYLYIYFFFYVNYIILFLFYSLXIYTFLIFFFYYYIFFIYYLLLLYSFFFFIILILIFYLNFSNFFIYYFLFFFHFSLYLFLSTFIFLIFILYLSIFLFYLYFYIFIIF

SEQ ID NO: 115974 - protein, 192 aa, Gossypium hirsutum
  Clone ID: uC-gsronu33B032h12b1.pep
PTLPAYDTYRNQQLNFSGKEEASNFERFLAGAAAGITATLLCLPLDTIRTVMVAAGGEALDGLFGTFRHMVQTEGFFSLYKGLVPTIISMAPSGAVFYGVDDMSKSAYLHSPEGRKRTQDMKLGVLELTAFEQSEVGPIRTLLYGAFAGACREAATYPFEVVRRLLQMHVRATKLSAFATRVKIVEAGGGMH

SEQ ID NO: 115975 - protein, 50 aa, Gossypium hirsutum
  Clone ID: uC-gsronu33B036a07b1.pep
NGPPLFFFFLFFFLFFIFFLFFFFFFFFFFFFFFFFFFFKKIKRDKRSRN

SEQ ID NO: 115976 - protein, 101 aa, Gossypium hirsutum
  Clone ID: uC-gsronu33B036a10b1.pep
PIPHQITEEITTVATPLENTTKCSAFHPILLIKDGSILVESFGSLFRVKRTMCLSYNRRIGLGRVKNIFMKVMLLFSLIMNLCRCNGYANAHLTLNPQSFP

SEQ ID NO: 115977 - protein, 44 aa, Gossypium hirsutum
  Clone ID: uC-gsronu33B036b12b1.pep
IIYPPKLGLLNFIFDVLRFKQVPYLQDQDRPRTDLDWGKAKSSD

SEQ ID NO: 115978 - protein, 69 aa, Gossypium hirsutum
  Clone ID: uC-gsronu33B036g08b1.pep
EFVGILGNLCISSLGFICFSILYSPFQFLSFLVKFSLFVFFILFRGVFPCKYLCLIFSVFIRIHSMIQV

SEQ ID NO: 115979 - protein, 97 aa, Gossypium hirsutum
  Clone ID: uC-gsronu33B037a12b1.pep
VKVNVDGSSNMNGHYLMVGCVVRDSTGNWLEGFRKYIGRGSALKSKLRVILTGLEVDSLQTTLRLLVEGGYLIPMEKIWENFVSTYLMALIRQIIEA

SEQ ID NO: 115980 - protein, 94 aa, Gossypium hirsutum
  unsure (1)..(94): unsure at all Xaa locations
  Clone ID: uC-gsronu33B037b10b1.pep
TILVHFKAQIILRKTXRSYSMTRSPSHAQDHIMAERKRREKLNQRFIALSAIVPGLKKMDKASVLGDAIKYVKQLQERLKVLEEQTKKRTVESV

SEQ ID NO: 115981 - protein, 170 aa, Gossypium hirsutum
  unsure (1)..(170): unsure at all Xaa locations
  Clone ID: uC-gsronu33B037f12b1.pep
RLRMRSGKYIALHLRYEKDMLAFTGCTSGLTDAESEELRIMRENTKHWKVKDINSTEQRIGGFCPLTPKEVGIFLQAIGYPPSTLIYVASGEIYGGDARLSELMSFFPNLVFKEKLATKEELNEFAKHASQSAALDYIASLEXDVFVPSYSGNMARAVEGHRRFXGHRRH

SEQ ID NO: 115982 - protein, 80 aa, Gossypium hirsutum
  unsure (1)..(80): unsure at all Xaa locations
  Clone ID: uC-gsronu33B037g05b1.pep
EKASTKLAGCLLFVWQTNKKSNVYVISIQLTLYQDWFFSFSFCNFLLLSIFSSKPNVINISPILSLNKGSVFKXXXXXXK

SEQ ID NO: 115983 - protein, 142 aa, Gossypium hirsutum
  Clone ID: uC-gsronu33B037h05b1.pep
PTRPQGLKFNSKKQEIWDPQRDCLIEKWMENKVSEKKIAGKKQGLKDFKRKSHHHHHHVSLISSSSSSSDSSSGGFFSSSDTESLNGSKTKAPCFVAPPSLPKPKPVRTSVSASPEKLDERSKSRAMKIYGILKQGETTHFT

SEQ ID NO: 115984 - protein, 155 aa, Gossypium hirsutum
  unsure (1)..(155): unsure at all Xaa locations
  Clone ID: uC-gsronu33B038b04b1.pep
NQTPLNTEKGPPTYNQYTNYKNKRLTETGGRRKKGLCYWCGLKFSYGHKCMKPQLIQLLAESMDEKSEPKVFSNFENEQPILFLQAMMGSLGFQTMRGNGKTGEHAISMLVDSGSIXNFIDTRVVKQLALRVVPGPRMGVTCKRWKSIYNEQMSK

SEQ ID NO: 115985 - protein, 119 aa, Gossypium hirsutum
  Clone ID: uC-gsronu33B038e11b1.pep
CSPYFWDQPHDFVPERFQVQKESEGIEGWAGFDPSRSPGALYPNEIISDFAFLPFGGGPRKCVGDQFALMESTVALAMLLQKFDVELRGSPESVELVTGATIHTKNGLWCKLKRRSNGH

SEQ ID NO: 115986 - protein, 71 aa, Gossypium hirsutum
  unsure (1)..(71): unsure at all Xaa locations
  Clone ID: uC-gsronu33B038f12b1.pep
FIRKKKKKKQKRKEKIKKLCKNGASSSRIRSKVLYATSKHGLREELDGIHYEIQATDPTEXDLEVLKDRAN

SEQ ID NO: 115987 - protein, 49 aa, Gossypium hirsutum
  Clone ID: uC-gsronu33B039e04b1.pep
PRSTMNLRVSLLASESSPRLRFQRSKQRLEGAKTTISPSFFILSYIYSK

SEQ ID NO: 115988 - protein, 63 aa, Gossypium hirsutum
  Clone ID: uC-gsronu33B039f04b1.pep
TIICFICFYIYKKRVRVSNHSQMPLNCLTLGFRVPHFLPQTNYIAFTTYVGSCFLAHRTIILP

SEQ ID NO: 115989 - protein, 125 aa, Gossypium hirsutum
  Clone ID: uC-gsronu33B039f07b1.pep
YFPIEIINADSMQVYQGLDVLTNKVPLREQNGVPHHLLGTVSSDVEFTANKFRDSAIPIISDILSRNHLPVIVGGTNFYIQAVVSSVLLDELVEDFFETYSRDHSGYEHTNSYACLPWRQFHFLL

SEQ ID NO: 115990 - protein, 126 aa, Gossypium hirsutum
  unsure (1)..(126): unsure at all Xaa locations
  Clone ID: uC-gsronu33B040c05b1.pep
MSQVEETMSYVYKNPNAPIEDRIKDLVSRMTLQEKVGQMTQIELCVATLDDVRNLSIGSMVSGGGKEPLEKAMASDWAETIDRFXQAAFCFRLGIPLAFGIDAVSWNNRFYCSIFFLTILFLNHKF

SEQ ID NO: 115991 - protein, 49 aa, Gossypium hirsutum
  Clone ID: uC-gsronu33B040d08b1.pep
DLALVDFVHARHSYRFPCISPFLVKAGQPLLSFLHIFKSVCVYKKIKCT

SEQ ID NO: 115992 - protein, 77 aa, Gossypium hirsutum
  Clone ID: uC-gsronu33B040d09b1.pep
QDYSIFPFGPCRKYLPQSHFPKDVFVAPLAGSNPFEHGMRIYHILKQNITWHAYTMMHHLQLTYLKLHQYHASYSIY

SEQ ID NO: 115993 - protein, 109 aa, Gossypium hirsutum
  Clone ID: uC-gsronu33B041e03b1.pep
ALSLNLSYVSRISSSHSQTLGTSLSVSNSSFSLSAASSPSIPYVYCGRGDKKTERGKRFNHSFGNARPRDKKKGRGPPRVPVPPSPPRKDKFDDDEKIKIEIDESLFTS

SEQ ID NO: 115994 - protein, 124 aa, Gossypium hirsutum
  Clone ID: uC-gsronu33B041f03b1.pep
SISFILFVIYFKKMPLSKPDKNNVVIDINDESSNNCGEDNQDEQDKLDAITSHLYIKPSHSKQTLDKDMVLRRIRHRKRMNNFRSAFQSFIGSSSSSSSSTKMTKNGKGSSNELKWVDDAFAAL

SEQ ID NO: 115995 - protein, 98 aa, Gossypium hirsutum
  Clone ID: uC-gsronu33B041g08b1.pep
PLVRKRILRKGAVRKLGDDFERVAKDKDSGVASGGKRGFSDGIGIDVMKIVEEVNVESEEIKKKKKRIVKGLKKGTDEVQSGTGTTTRASPRLAKRGC

SEQ ID NO: 115996 - protein, 93 aa, Gossypium hirsutum
  Clone ID: uC-gsronu33B041h07b1.pep
SFRPACAALNGIIMGDKTLTIRRANQGATQPKPEQESVLQHAQQQIALQRLILQPQGVPTKVVCLTQALNVDDLRDGEEHVDLVCCHCGNACF

SEQ ID NO: 115997 - protein, 83 aa, Gossypium hirsutum
  Clone ID: uC-gsronu33B042f05b1.pep
KTATKINLGTQIKKIVLEKSEKKIGILKTAPPKLIFLKRKIILFFFFFFFFFFFFFFFFFFFFFFFFFFQQNIDLYAQSHMIN

SEQ ID NO: 115998 - protein, 126 aa, Gossypium hirsutum
  unsure (1)..(126): unsure at all Xaa locations
  Clone ID: uC-gsronu33B042h06b1.pep
MKMEEILIYSLLSVLILWVATKLITSTHKNHPPSPLALPILGHLHLLKEPLHRTLFTLSQKHGPIFSLKLGSRFWSSXSSPFTVQECFTENDIRLANRPRFIMGKFVGYNYTTLGLAPYGDHLRNL

SEQ ID NO: 115999 - protein, 58 aa, Gossypium hirsutum
  Clone ID: uC-gsronu33B044c03b1.pep
VTISRMKCPKGESCNSPIFSGDGSVVLGPQISVMLTHKYSKKNIYESLRSYQNLVRKY

SEQ ID NO: 116000 - protein, 102 aa, Gossypium hirsutum
  unsure (1)..(102): unsure at all Xaa locations
  Clone ID: uC-gsronu33B044c11b1.pep
RIYASRLSATQLSICIKTMNPTHTCGGSAVTVGHQSWVAGIIKEKLKIFPDYKPKDMXDDIEQEYGIQLNYCQAWRGKEIVQEQLLGVILGCLFDCFLFFGC

SEQ ID NO: 116001 - protein, 75 aa, Gossypium hirsutum
  Clone ID: uC-gsronu33B044e01b1.pep
ILKYKKMKVRVLNLFFFPTKHPNRKNKYILLSFYFTTPSIFHISIFLSSYQAKPKTRNNILLPTFFFFFTFSYLF

SEQ ID NO: 116002 - protein, 127 aa, Gossypium hirsutum
  Clone ID: uC-gsronu33B047a08b1.pep
SPLVRPRVRCDWGHSDVSDGDDDENLEKSAAGSRVKSKRSIAGLAKCTANEDGINIADLIGYRIKVWWPMDKKFYEGTIKSYDPIKRKHVALYDVERGEVLRLERERWELVNAGRKSIKKAKSPKGT

SEQ ID NO: 116003 - protein, 170 aa, Gossypium hirsutum
  Clone ID: uC-gsronu33B047a11b1.pep
GEALHKGWIHLDWPIRHQIALGVAQGLAYLHHDLLTPIIHRDIKSTNILLDANYEPKVADFGIAKVLQARGGKDSIITVIAGTYGYLAPEYAYSSKATTKSDVYSFGVVSFGFPFFYYTFFLFQFQISLISLLFLFLFPFSSYVYPSSNSIHFCSFSFFFFYFLSLFFFF

SEQ ID NO: 116004 - protein, 115 aa, Gossypium hirsutum
  Clone ID: uC-gsronu33B047b08b1.pep
FGMELLCTQDNPEYKYTIAMMGYGPEEKNAVLELTYNYGVTNYEKGNDYAQIAIGTDDVFNTAEAVRLFGGIVTQEPGPLPGINIKITACLDPDGWKTVFVDNIDFLKEMEWSFR

SEQ ID NO: 116005 - protein, 71 aa, Gossypium hirsutum
  Clone ID: uC-gsronu33B047e02b1.pep
PSRSPTRPPTRPDSCYLPFHFVVLHHFFRNQLRFLKQLSFSIVFMIGFQPFESFLIEVVCFFKLNNAPRSI

SEQ ID NO: 116006 - protein, 142 aa, Gossypium hirsutum
  unsure (1)..(142): unsure at all Xaa locations
  Clone ID: uC-gsronu33B047e03b1.pep
MVDQLTDEQIAEFKEAFSLFDKDGDGCITTKELGTVMRSLGQNPTEAELQGMINEVDADQNGTIDFAEFLNLIARKMKDTDSEEELKEAFKVFDKDQNGFISAAELRHVMTNLXEILTEREVDEMIHEADTDGDGQVNYERL

SEQ ID NO: 116007 - protein, 103 aa, Gossypium hirsutum
  Clone ID: uC-gsronu33B047e07b1.pep
THLSYRNPLLAVHSPNVQPLVFPLPSHPCLPHGVEQMQDLPISSLPHIGNASRKLYHPWGQWMRAQQSPSVATLSEIVLRTRTGNRTLDYSIPNICLAPFIAG

SEQ ID NO: 116008 - protein, 101 aa, Gossypium hirsutum
  Clone ID: uC-gsronu33B047f01b1.pep
LLRSARITSLSSALTSAERLVEAYFRRNVVGRNQEQPPPVNDRDSLSSNAAVINTESQLDAAVEIDSAISVSTSSSSRRNNVSRVLDVDGINPRSVRRRLN

SEQ ID NO: 116009 - protein, 78 aa, Gossypium hirsutum
  Clone ID: uC-gsronu33B048a01b1.pep
KPSTFSFPPILSCYNKPVFFFFHFPFLLLPLSKQTTRIYILYIYQKRDFSLTLFRCSEEKITSVTVKVQVSVKFSQFQ

SEQ ID NO: 116010 - protein, 198 aa, Gossypium hirsutum
  unsure (1)..(198): unsure at all Xaa locations
  Clone ID: uC-gsronu33B048b01b1.pep
PTRPIIPFTVLLETVFLKKQFSQKIKLSLFLLLGGGGIASITDLQLNFVGTILSLLAIATTCVGQILTNTIQKRLNVSSTQLLYQSAPFQAAILFVSGPLVDQFLTNQNVFAYKYSPIVLAFIVLSXIISVSANFSTFLVIGKTFPSSYQVLGHLKTCLDLCFRYTLLHDPLQTEHLGILEAILHGLYSYLPQRQKNS

SEQ ID NO: 116011 - protein, 80 aa, Gossypium hirsutum
  Clone ID: uC-gsronu33B048e08b1.pep
MEDLSFIVGVIGNVISVLVFLSPVGTFWRIVKNGSTEDFESLPYVCTLLSSSLWTYYGITKPGAYLVATVNGFGILAEAC

SEQ ID NO: 116012 - protein, 103 aa, Gossypium hirsutum
  Clone ID: uC-gsronu33B048g02b1.pep
MNVIYRPVLDKGFMMLMDGHRIEDLQRMYSLFSRVNSLEPLRQAVSSYIRRTGQGIVMDEEKDKDMVPSLLEFKASLDSIWEESFSKNEGFCTHIRDAFEHLI

SEQ ID NO: 116013 - protein, 41 aa, Gossypium hirsutum
  Clone ID: uC-gsronu33B048g03b1.pep
SLPPSIDFDDLTTFSNKINTLSNIIFSVFTIILVIIFSTLN

SEQ ID NO: 116014 - protein, 42 aa, Gossypium hirsutum
  Clone ID: uC-gsronu33B049d10b1.pep
LKQCIPLCQVKIIDAIGSICGHITVTSHTQPRRYGQIMGVTS

SEQ ID NO: 116015 - protein, 165 aa, Gossypium hirsutum
  unsure (1)..(165): unsure at all Xaa locations
  Clone ID: uC-gsronu33B049e02b1.pep
VVNYLAVHRQGLRVNVEKLWSLLNSSWLKSLGEIFESLAKVAKSLYPKWKFGIPATEYVEGTATLASSLYYQALGVPTGPHGAFRDYQVDAITLEISPKFSLDKVWRNDILLRGGRLIEGVIRSVNNLXEKFHQSFFLYLLTSPXKFVAVGVYMIAFALLIAPLP

SEQ ID NO: 116016 - protein, 61 aa, Gossypium hirsutum
  Clone ID: uC-gsronu33B050d12b1.pep
IFHGKDDEVIPLECSFNVQKKIPRARVKVVENKDHITIVVGRQKVFARELEEIWNRSSRSH

SEQ ID NO: 116017 - protein, 142 aa, Gossypium hirsutum
  Clone ID: uC-gsronu33B050f05b1.pep
DVIIAKIREMGMAYYLSKKLPNVIANNIEQCLFETLGPCGVDDWNKLFYVVHPGGPAVLKRIEEKLGLGSDKLKASWHVLSEYGNMWSPSVLFVLDEMRKRSTEEGKTAAATEGLEWGVLLAFGPGLTVETVVLRSIAADSA

SEQ ID NO: 116018 - protein, 125 aa, Gossypium hirsutum
  Clone ID: uC-gsronu33B050h10b1.pep
SHASASMMWSNEPSFEAEWGTQMNQVPPNGFFNITTCTAAATSTWPLSGTTESTMDLSYSDQCPIELQMNMNGKTNMLSMPMSQIDETAEGVWPSHQQFEQCDNNGWSSANGSWDPYLYVSSVLG

SEQ ID NO: 116019 - protein, 110 aa, Gossypium hirsutum
  Clone ID: uC-gsronu33B055b08b1.pep
HSSAMNKLLMEENDRLQKQVSQLVCEKSYFRQQSQQQAGLATTDTSCDSVVTSGHQHHLTPQHPPRDASPAGLLSIADETLTEFLSKATGTAVEWVQMPGMKPGPDSIGI

SEQ ID NO: 116020 - protein, 49 aa, Gossypium hirsutum
  Clone ID: uC-gsronu33B055c05b1.pep
MVTESWFRNLWKIPRRQDGISEKVEIGVLAFEVASLMSKLVHLWQCLSD

SEQ ID NO: 116021 - protein, 101 aa, Gossypium hirsutum
  Clone ID: uC-gsronu33B055d05b1.pep
MGSLGKFKPYFAAIFLQVGLAGMDILSKAALNQGMSNYVLVVYRHAIATLVMAPFAVILEKKVRPKMTISIFIKIMVLSLLEPVIDQNLYYVGIEVTTCTL

SEQ ID NO: 116022 - protein, 143 aa, Gossypium hirsutum
  Clone ID: uC-gsronu33B055e08b1.pep
FEWLKLRTDKALVEDPKFKRYVELYAKDEDAFFRDYAALHMKLSELGFISPPSKLFFEVDLVFRFRFESLLYFINIVSLFIYSFPSLYSLLIIFFLFFFLYSFFNFFIFHFSFFFLFFLSFSTYILLIFNFIFTFFLLFFLFI

SEQ ID NO: 116023 - protein, 98 aa, Gossypium hirsutum
  Clone ID: uC-gsronu33B055f05b1.pep
KVTFAPSSSPNSCKPLGNLSKWMTSMKEIEEDLNKKISFLSGLIVAFRDQIHTDIQLKPGNDGPSIPAHRALLAARSEIFRNMLDSDGCKVPPSDAFT

SEQ ID NO: 116024 - protein, 48 aa, Gossypium hirsutum
  Clone ID: uC-gsronu33B058d07b1.pep
FWHLYVKLLNRTCVKLLGKGDGNFKKGSINACHKKFGLSCQKFNFFIN

SEQ ID NO: 116025 - protein, 120 aa, Gossypium hirsutum
  Clone ID: uC-gsronu33B058e01b1.pep
FGRLKIQLNSCFLILSLSYLFLPLILSDARKDALIEGWTSIKIIKDPHMTEITEFAVDEHNTQLKGSLKVEEVVKGETQVISGINYKLVLQAKDGTADNSCEAVVWEKAWLKIKKLTSLP

SEQ ID NO: 116026 - protein, 89 aa, Gossypium hirsutum
  Clone ID: uC-gsronu33B058h03b1.pep
MAIAWSEKASFMEVMSRPPSLSPPVILTHDELKKIAEYKADEFAESGMVLGLGTGSTAKHAVDRISELLRLGKLRNIVGIPTFKKTHEQ

SEQ ID NO: 116027 - protein, 93 aa, Gossypium hirsutum
  Clone ID: uC-gsronu33B058h07b1.pep
GLPFIQSSPFITHQQLFPSPLPIFSSLKTLIPPLNSLLFILVSRTERANNAALTSCSYAIARIHLLCPPIYLTFYLPFVGNNSYWDLDVTIIG

SEQ ID NO: 116028 - protein, 75 aa, Gossypium hirsutum
  Clone ID: uC-gsronu33B061f10b1.pep
NVDFIFGDAAAVFQSCNIYIRRPMSGQKNTDTAHGRTDQNENTGIVIHNSRVTASPDMKEAQGASKSPSARSRNN

SEQ ID NO: 116029 - protein, 91 aa, Gossypium hirsutum
  Clone ID: uC-gsronu33B061h12b1.pep
ETRTLLDNLETKLKMSSVSKADRKTALDVASWSFNIVTSAGIIMANKALMATYRFSFATTLTGLHSATTTLLTGPLRWLGYIQNLHIPLPD

SEQ ID NO: 116030 - protein, 78 aa, Gossypium hirsutum
  Clone ID: uC-gsronu33B062b10b1.pep
LKGTFQNSSFGAGGATIAAGRLVVDNGVLKAVWPHSGHYRPLEENFNESFNNFISFLRENNVGHNNVKVKKRYYSFCK

SEQ ID NO: 116031 - protein, 64 aa, Gossypium hirsutum
  Clone ID: uC-gsronu33B062e04b1.pep
FVLLSFHAGLLTGTEYAKRPIHKPEPQLNLMKNRSKNKSMGGMSCLIKPLDHAGQVLPLMLCKS

SEQ ID NO: 116032 - protein, 81 aa, Gossypium hirsutum
  Clone ID: uC-gsronu33B062h08b1.pep
ARAGTNCCQSWAADKNIDVNASVGKEALYRFGNTGKGGSLRSYRRVRAPNPTSKLANDKARTKLENMSLKEAIIPLCQRIH

SEQ ID NO: 116033 - protein, 121 aa, Gossypium hirsutum
  Clone ID: uC-gsronu33B076a04b1.pep
HVFYLTIPTVQHLTATMWTDEGMVKRIRGEAFTTRVSVQLGNEMIYAARGIFNRLLPDVYIASDYRKRLEAGNSPGYGISLVAETTSGCCISADTTGSYPRGDEEQDIEEWGKKELIPATD

SEQ ID NO: 116034 - protein, 144 aa, Gossypium hirsutum
  Clone ID: uC-gsronu33B076c04b1.pep
SCDVYSFGILLLELLTGRKPIEKLPGGVKRTITEWVEPLIAKERFKELVDPKRRGNFDHNQLKQAIYVAALCVQSEPEKRPNMKQVVGMLKGYDTRGNLMQTRMDSVKYKEELLALDQRSDDDDDDDDDDGDGLEESCGVFGAM

SEQ ID NO: 116035 - protein, 144 aa, Gossypium hirsutum
  Clone ID: uC-gsronu33B076c05b1.pep
KRSLMNSWSGSGRRPRIMASSLSLPQNTITDILSRLPVKSLTRFKSVSKNWADLTSAPAFIAAHLRRSSTDPSLLIRRYHSQSGWDYGIWLITTPTLSYATQLLRIPLEESLPLFPKIVGSVDGLVCLDISPCYASDFVCGTLD

SEQ ID NO: 116036 - protein, 58 aa, Gossypium hirsutum
  Clone ID: uC-gsronu33B076e06b1.pep
FRLGSISRNIRRFFLIPKEASAAHIFGDIGCHNVPLEIDLHQSPTQVIKGYNVNKSTR

SEQ ID NO: 116037 - protein, 153 aa, Gossypium hirsutum
  Clone ID: uC-gsronu33B076f06b1.pep
PRVRPRVRGPKFNDPVQVSCGAAHTVLVAHDGYKLWSWGRGRSGVLGNGKTVDCFSPTIVLWPPLNEDFKQEELNQDDKIVDQKGSDGVSEMEKKLSLAMEEMKLLQSKLSTMERYASILHGSIFGKPFEVQDIPISLQNSGTFDIAGEWENM

SEQ ID NO: 116038 - protein, 69 aa, Gossypium hirsutum
  Clone ID: uC-gsronu33B076g08b1.pep
ANKHPTLQLHMRFRTSMFRAEKGLLRNCYRTSMPDPCDLNSDSRNSAIGVMVSGVSHYGLLVKSSPDVV

SEQ ID NO: 116039 - protein, 78 aa, Gossypium hirsutum
  Clone ID: uC-gsronu33B076h10b1.pep
LAFLLFFFTHSMAPSSRRGKTSRNACKPRRSKYRKKLVKPSINIQTSTSATLDDSASKIDDGFALHHIIEGDDDVSTT

SEQ ID NO: 116040 - protein, 155 aa, Gossypium hirsutum
  unsure (1)..(155): unsure at all Xaa locations
  Clone ID: uC-gsronu33B077c12b1.pep
AFLFFFFWEKAWSFGLVLLWFSTLSCYLVNAADDKNGGFGASFIFGDSLVDAGNNNYLPTLSRANIPPNGIDFKASGGNPTGRYTNGRTIGDIAGEELGVPNYAVPYLAPNSTGKAILYGVNYASGGXGELLNATGRIFANRLGLDIHIDFFNNT

SEQ ID NO: 116041 - protein, 178 aa, Gossypium hirsutum
  unsure (1)..(178): unsure at all Xaa locations
  Clone ID: uC-gsronu33B077e11b1.pep
SLYEEFNLKELIEELTNLAGAFNLADFVPFLGAFDLQGLIARTRTLGEKLHEALETIINDHQQQKQDDFVGTMLTELNKQMNPDGDIMDRNSIKAITIDMIVGSLDTSAATLEWALSELIRHPMVMLKFQQELESVIGKRMVEENDLPKLEYLDMAVRETXRLHPCAPLLVPRESMED

SEQ ID NO: 116042 - protein, 144 aa, Gossypium hirsutum
  Clone ID: uC-gsronu33B077g06b1.pep
MTKIRTCFLRSRHSMELDQVAFPQVAMVEAAKENLEKGRRHSFSFRGEIRTSSQSAPLFSENKSDPCEKIQPLSARKFSSYVLPTPVATESSIGLGNPAPQSSKASLNEQSNNSWHSSSLEHKKHEMILGDEKVSGSAVIMHSL

SEQ ID NO: 116043 - protein, 83 aa, Gossypium hirsutum
  Clone ID: uC-gsronu33B078a10b1.pep
MFRHMQYNMYSLKRLDILKRMVLFCKAAVEVPWYVPCGGVCYGDGNLVFIANDWHTALLPVYLKANYRDNGLMSFTRSILVVH

SEQ ID NO: 116044 - protein, 50 aa, Gossypium hirsutum
  Clone ID: uC-gsronu33B078b07b1.pep
HSTELPVNYFFLPICNSFTCFSLLFISFLFLNFFSSFLYFFYFSFLTFVS

SEQ ID NO: 116045 - protein, 49 aa, Gossypium hirsutum
  Clone ID: uC-gsronu33B078b11b1.pep
KKFCACYLFNQLGRRTCLTCDEGRYQFFARFGSGMTRIASTDLLSDYMA

SEQ ID NO: 116046 - protein, 75 aa, Gossypium hirsutum
  Clone ID: uC-gsronu33B078d03b1.pep
RIFFPKTIKPSYVSSFFSQPEMHPTVKLQSGSLPFRDPTFDASGSSSPPISDIRLARGWKSSEAASHYQANTLRV

SEQ ID NO: 116047 - protein, 67 aa, Gossypium hirsutum
  Clone ID: uC-gsronu33B078h07b1.pep
VAKRKAWQFQQWDPPTFIVNRRPLHYNTFFAQYASGKAFFCFLFFFFFFFFFFFYFFFFFFFYIFYA

SEQ ID NO: 116048 - protein, 66 aa, Gossypium hirsutum
  Clone ID: uC-gsronu33B079h07b1.pep
ALLSRIRGPSGYGGRSSYYGHSRSRSPSPMRSPHHPSSSRGRYRSRSYSPAPRRRGNYSVSPGRKH

SEQ ID NO: 116049 - protein, 78 aa, Gossypium hirsutum
  unsure (1)..(78): unsure at all Xaa locations
  Clone ID: uC-gsronu33B080b11b1.pep
CVQDDETRRPSMGXVVQILEGVLDVNLPPIPRFLQVLGDNSEHVVFFTESSSNQSSQTPSYTSTASSQAKSNTSSMSS

SEQ ID NO: 116050 - protein, 182 aa, Gossypium hirsutum
  Clone ID: uC-gsronu33B080e07b1.pep
YLLPPSHRSYGERSGLETDGRQFSDFYRNSSEELFIKSLMESPMGMPVPNMEMLGFKNLSQNFRADSEELFRSWLTNGENQGHNSSNIAHRTRQASRRLSTEMASLSSQQPTTLLQKKKSSDVLHLQNNSVGGETSGDLNQNSARTAGDRGFQASNLYLAKAWFHSSQPMTRSRSSDLRRDM

SEQ ID NO: 116051 - protein, 77 aa, Gossypium hirsutum
  Clone ID: uC-gsronu33B080g10b1.pep
MCRKCGKPFGVKGDWRTREKNCGKLWYCTCGSDFKHKRSLKDHIRSFGNGHSPHPSLEGFEDLDKDCITGSEDELTH

SEQ ID NO: 116052 - protein, 104 aa, Gossypium hirsutum
  unsure (1)..(104): unsure at all Xaa locations
  Clone ID: uC-gsronu33B087d10b1.pep
STPGVTRGIGSNDGAGLGASLFPGLNPLGGGGGSGGFGLFGSGLPVFEQVQHLLTQNPNMMRVIMNSPAFQSLMNNPELMRSLFMSHXNTREIIDWYPELVHFT

SEQ ID NO: 116053 - protein, 68 aa, Gossypium hirsutum
  Clone ID: uC-gsronu33B087g03b1.pep
LTLFFIIFSYKETISLWFAMANSILITDYQRKAFNVVGLGLSLMLLMISEGLCQRFLSELGPSQWHQC

SEQ ID NO: 116054 - protein, 91 aa, Gossypium hirsutum
  Clone ID: uC-gsronu33B089a08b1.pep
GACRKGVARGFCVISAQVASGIFLTFSLLVHLFLPKYEVLSTCLIWHFSYQFPFPYVKMLVSMDACFHNKLYPGILMNNFMRRKNKVLACK

SEQ ID NO: 116055 - protein, 169 aa, Gossypium hirsutum
  unsure (1)..(169): unsure at all Xaa locations
  Clone ID: uC-gsronu33B089c05b1.pep
MAEVKLHGFWSSPFSHRVIWALKIKGVNYEYIEEDLSNKSELLLKYNPVYKKIPVLVHGGEPIAESLVILEYIEETWPNNPLLPIDPYDKAIARFWIQFGVDKGPIFSDFFRSTCGEEQEKTTKELLEALKIIEEXALGDKXVFGGNAINLVDISYGMIAYWFKLLKSN

SEQ ID NO: 116056 - protein, 100 aa, Gossypium hirsutum
  Clone ID: uC-gsronu33B090d09b1.pep
SLMIIMTKHSTSFPTSLSIVIQQQCTSISIKWNGSMKERSRHQFKFQNYDSYASWCITSGSWLAIQITDNSIFNPWLVKKKSDRRSFSELRLASPATSFT

SEQ ID NO: 116057 - protein, 123 aa, Gossypium hirsutum
  Clone ID: uC-gsronu33B090e06b1.pep
SHLQVFNRCIKEELQGKTRILVTNQLHFLPHVDYILLISNGVIKEEGTFEEVSRKGRIFQKLMENAGKMEKREGKGDGRYIDMEKLEPNSNKMVENEINDILKDANAAKRRTGMKAILVKQEE

SEQ ID NO: 116058 - protein, 92 aa, Gossypium hirsutum
  Clone ID: uC-gsronu33B090h05b1.pep
MSITTSSSAGFKLICLLHSAGALSSGSLMMFDMKGIYTFTHGIETATKLLGSSPHDQLLIRTSDSFSGLLLVAIGFLLVMVSFVKDKSFQSF

SEQ ID NO: 116059 - protein, 68 aa, Gossypium hirsutum
  Clone ID: uC-gsronu33B096d05b1.pep
QIVQNIRSETGAQIRILKDDLPSCALSTDELVQISGEAVVVKMFFYLIGYPLYYVLFMLLALALILFV

SEQ ID NO: 116060 - protein, 107 aa, Gossypium hirsutum
  unsure (1)..(107): unsure at all Xaa locations
  Clone ID: uC-gsronu33B098a07b1.pep
LCTGCLFRRVAGGGYDXPPRSIEHHPGCCSCCFFGRNKKHSSMAHSPEENRALRMGDSDDEEMNLSLLPKRLGNSTFLIDSLPXAEFQGPPLADHXLVKNGLPPGCS

SEQ ID NO: 116061 - protein, 89 aa, Gossypium hirsutum
  Clone ID: uC-gsronu33B098f09b1.pep
SLGLTIAGLSSRNPIPRFDFDKVNMDFDSPFIKVNSPFHFIFLCSRIHAKTGKWRGKKIEKGNKSGSHLSIFFCVLDFKMYIVRVTHYK

SEQ ID NO: 116062 - protein, 119 aa, Gossypium hirsutum
  Clone ID: uC-gsronu33B099c03b1.pep
SFKIGHATFPHPGTYMQGSGKLGLGIRNDVARSNFFVDSSTCYELVAAEYLGDGVVSEPGWLQFMRKWGPTIVHDISILPLVLRYSMANIFIKLPVELYGREGPTGPKEKNNWVGDERG

SEQ ID NO: 116063 - protein, 69 aa, Gossypium hirsutum
  Clone ID: uC-gsronu33B101g02b1.pep
SLVRPRVRACSMFAHTNPLHLDVFQSVARFEAEVVAMTADLLGCKEKAFGGQVCGNITSGGTCVHIVSS

SEQ ID NO: 116064 - protein, 43 aa, Gossypium hirsutum
  Clone ID: uC-gsronu33B103a10b1.pep
KVNILLPLKKRRHFIIASYVLRAQCKKENNWDEFFILLITIRN

SEQ ID NO: 116065 - protein, 171 aa, Gossypium hirsutum
  Clone ID: uC-gsronu33B104a07b1.pep
PRVRFEYPYNNALHHHVESIILSCLESKNDAIVDHLLQECDLIRKLIQTDKYPFLSGDNNQPTLPAAGKHAPRAGNIGHITRISNKLVQLGGSNSCIQTRLQGNSEWNEWLANVLQERNAVENVYRWACGRPTALQDRISDEDDLLDRDYDVAILANTLSQAFGYKWHDDN

SEQ ID NO: 116066 - protein, 160 aa, Gossypium hirsutum
  unsure (1)..(160): unsure at all Xaa locations
  Clone ID: uC-gsronu33B104a09b1.pep
MTSTTLSTSPPLLPRPSTEPTQPPVSNDPPSFTPIHDASDINQIELLSVSWNQDYGCFAAGTSQDFRIYNCQPFKETFRRNLKTGGFKIVEMLFRCNILALVGGESNSHYPPNKVIIWDDHQSRCIGEFAFRSEARAVTLRRDRIVXVLEHKIYVYRFMD

SEQ ID NO: 116067 - protein, 161 aa, Gossypium hirsutum
  Clone ID: uC-gsronu33B104b03b1.pep
PTRSQGLNPFNADDTQASAAGTGIGSSTHSTPIQLSSSASSPSFGLGGNATFSSGTSIFGSSASVAKPFSSGASFGTSSSSSETNSLSSSSGIAAGAFGSNWQAPKTLTFGLSSGFSFGSSTSVSAPSSAPTIFGSSTGASSSSIFSFTSAAAATPSQPCV

SEQ ID NO: 116068 - protein, 133 aa, Gossypium hirsutum
  Clone ID: uC-gsronu33B104c11b1.pep
PRVRKQVARLFGPAIFEASKLKVLFLGVDEKKHPGKLPRTYTLTHSDITSKLTLAISQTINNSQLQGWANKLYRDEVVAEWKKVKGKMSLHVHCHISGGHFLLDLCARLRYFISCNELPVGRFLIIHFFGDIL

SEQ ID NO: 116069 - protein, 109 aa, Gossypium hirsutum
  unsure (1)..(109): unsure at all Xaa locations
  Clone ID: uC-gsronu33B104e06b1.pep
MANHRVGETGLTDSGPSSNHHHHHHNIPYAVLHGMNVPQSFMHQQGPAFDFGELEEAIVLQGVKIRNDEAKPPLFTAGRPAATLEMFPSWPMRXSQTPRGCSKSGGEST

SEQ ID NO: 116070 - protein, 91 aa, Gossypium hirsutum
  Clone ID: uC-gsronu33B104e08b1.pep
HACMLLNHEQSIMLVDEPVRIIDWLKRLALISTLRSMSVPCLNCVILLELEALRIGLELICSVDGYKHICYSFHTLSAMVQEILGKYSTWC

SEQ ID NO: 116071 - protein, 105 aa, Gossypium hirsutum
  Clone ID: uC-gsronu33B104g06b1.pep
NHLLKNILCILNILSVFEYILHRKKSLPPPCYRLSSALYSRLKLKIWKKKSKTPLLSDICCACVPLFRRFGDRGVRATAAERQTRCAGTVAACRGELLRLGFLLV

SEQ ID NO: 116072 - protein, 97 aa, Gossypium hirsutum
  Clone ID: uC-gsronu33B104h04b1.pep
NLGIMFFFVVFFFFKWNVHPFIFFLLTEQKQNCIEFPHLFIFLPPFMQYIYSNIISIYIQNSWNCMQQRVTKILGCACVAVPISPCQCEKIWKSSDE

SEQ ID NO: 116073 - protein, 95 aa, Gossypium hirsutum
  Clone ID: uC-gsronu33B106b12b2.pep
RSLRRKDAFRGVAHENPRAFSPSAYEFFHPKTQNHDTKYPCAASKCSPLPVAAEVDSNKALETKALPQQKPGHPLGWWSVHSLVRLVASAWAVSM

SEQ ID NO: 116074 - protein, 76 aa, Gossypium hirsutum
  Clone ID: uC-gsronu33B106d07b2.pep
ILRKRRAGKLPGDTTLILKAWWQSHSKWPYPTEEDKARLAQKTGLQLKQINNWFINQRKRNWHNNPSTSLKSKREK

SEQ ID NO: 116075 - protein, 156 aa, Gossypium hirsutum
  Clone ID: uC-gsronu33B106e12b2.pep
MLAEGSEPDYLLEAVVGHVYEGSFHMPNRSNTQLPTSSQPQTVESDYYGETQKGPKQSSIKVRRAKPGDNPKARPRDRQLIRDRLKELRELVPNGAQYSIDGLLDQTIKHMVYLRRVTNQVEKLQQWAHREVTSRKNIRSSETKENYQLETSWGFE

SEQ ID NO: 116076 - protein, 177 aa, Gossypium hirsutum
  unsure (1)..(177): unsure at all Xaa locations
  Clone ID: uC-gsronu33B106g06b2.pep
MNPTLVFFIIILCSTSISICLADNDNLQDACPTNTTVTRMVFINGFPCKNPSSISSADFTTSNLKDAGDTDNFLHSSVNIVTAADFPGLNTLGLSIARTDLDLDGMVMPHSHPRASELFFVRKGIVLAGFIDTNNTLFESLINEGDVFLVPRGLLHFCLNAGYEAGXAFSVMNSQNP

SEQ ID NO: 116077 - protein, 110 aa, Gossypium hirsutum
  Clone ID: uC-gsronu33B106g09b2.pep
SHQPPAQELIARDLHDNEWKFRHIFRGQPKRHLLTTGWSVFVSAKRLVAGDSVLFIWNDKNQLLLSSTISSFSTDISCRMIIGKKYDHDDFSEKGFKATLREGKLELRLI

SEQ ID NO: 116078 - protein, 178 aa, Gossypium hirsutum
  Clone ID: uC-gsronu33B107e04b1.pep
SVEGILRDLPGVSRAVVALATSLGEVEYDPTVISKDDIVNAIEDAGFEASLVQSSEQDKIILGVAGVFNELDVQLIEGILSSLKGVRQFRFDRSSGELEVLFDPEVASSRSLVDGIEEGSKGKFKLHVMNPYARMTTKDEETSFMFQLFTSSLVLSIPVFLIRVVCPHIPLLDAFLLW

SEQ ID NO: 116079 - protein, 143 aa, Gossypium hirsutum
  unsure (1)..(143): unsure at all Xaa locations
  Clone ID: uC-gsronu33B107f11b1.pep
AVKAINEKILSVLDETGSGRVDLGMFYAVLAPLCSGPPDKRKRIAFDALLWRPVNEGGSHIRKVDAVQYIKLLRAIFIPSHGASEMLEVHGETDTSMVSFNEFLIMFNDPDWGFGILSTLLXLETGNRXNRHERHVCSVCRTQ

SEQ ID NO: 116080 - protein, 91 aa, Gossypium hirsutum
  Clone ID: uC-gsronu33B107g11b1.pep
KCKEILEINLRRHTLIVFYKYAIDFIFPYNMFFHWSNFIKPWFESSINFMSLSRFVKVKNSNYVALDRFIKAFYIFALPTKFSIFTFNGEF

SEQ ID NO: 116081 - protein, 131 aa, Gossypium hirsutum
  unsure (1)..(131): unsure at all Xaa locations
  Clone ID: uC-gsronu33B108a05b1.pep
MSASLVSSHNLDDDDVEDLEMLLEAYFMQLDGTRNTILSVREYIDDTEDYVNIQLDNQRNELIQLQLTLTIASFAIAVETLVAGWFGMNIPFTWNNKEGIFGIFVGSITVGCVLXXLLILGYARWKKLIXS

SEQ ID NO: 116082 - protein, 141 aa, Gossypium hirsutum
  Clone ID: uC-gsronu33B108c10b1.pep
FSVKGLAPMSKVGGYDLSGDAMMEDWFKQFEELAGSQDMESIVETVMQKLFSKEILHGPMKEIEERYPQWLDEHKTSLSKEEHERYSLQYELIKELNGVYENDPRNFTWIVDLMQKMQECGQPPNDILQDLAPEFGLWNLD

SEQ ID NO: 116083 - protein, 179 aa, Gossypium hirsutum
  Clone ID: uC-gsronu33B108e04b1.pep
GDIICEICHGSYQPDYAGPPRPQTDETAIDIGGGWTISGTPLDLRDSRLLAIAEAERQFLETGYDEYAASNATGAAFCRSAAVILMALLLLRHAVTVPDADSDDDVSSFFSFFLLRAAGFLLPCYIMAWAISILQQRRQRQEAAALAATQVAFVLQSGQSRAMHFAIASGPAATLHPNV

SEQ ID NO: 116084 - protein, 58 aa, Gossypium hirsutum
  Clone ID: uC-gsronu33B108g02b1.pep
LVVGHATNCIPLTVPYRYRSNLIIFRVAQHWTLTVSLLAATITIAISTIRAHYRPLEM

SEQ ID NO: 116085 - protein, 182 aa, Gossypium hirsutum
  unsure (1)..(182): unsure at all Xaa locations
  Clone ID: uC-gsronu33B108h05b1.pep
LVSTGTLYSMARCAVFTDEGGDFEGQYFAFMSDAMSIIVGSLLGTSPVTAFIESSTGIREGGRTGLTALTVAGYFLLAFFFTPLLASIPAWAVGPPLILVGVLMMRAVVEIEWDDMRQAIPAFVTLILMPLSYSIAYGLIGGIGTYIVLHIXDWARDVLVKYGVVKRRQIAANGAHIQQHAS

SEQ ID NO: 116086 - protein, 143 aa, Gossypium hirsutum
  Clone ID: uC-gsronu33B109a04b1.pep
MPSKGNQQIPKVHVRKQWQNYVKTWLDQSGRKKRRIEARKAKAIRVFPRPLGLLRPVVHAPTIRYNAKIRAGRGFTLEELKAAGVNSLVARTIGIAVDHRRRNRSDISLRANVQRLKEYKAKLVLFPKNPKKPQHGEASTSEK

SEQ ID NO: 116087 - protein, 142 aa, Gossypium hirsutum
  Clone ID: uC-gsronu33B110a07b1.pep
HYGGATGNNENDASGHPVGQNAYEDSYGIHQRHGALPPAATGANAGAASVYGGTQSGSGPASMRSTYEMSRGPAYDLSRVSGYESQRVPAYNAQKGPSYDGQRTHVYDAQRGAGYDTQRGPVNDPSRCATYDAATRSLGMPH

SEQ ID NO: 116088 - protein, 161 aa, Gossypium hirsutum
  Clone ID: uC-gsronu33B110b12b1.pep
SPRVRGRVGDDEEEDGFLKAFKVANFEYKDEAETVVEEEAQKVAVEEKNTMNNSERTSYWEELLRDRYEVHKVEEFNALGKGKRSRKQMVSVEEDDLAGLEDVSSDGEDDNFEAELTDGDTTSSGTQSGRRPYRKRNRVDSTEPIPLMEGERKSFRVLGFN

SEQ ID NO: 116089 - protein, 151 aa, Gossypium hirsutum
  unsure (1)..(151): unsure at all Xaa locations
  Clone ID: uC-gsronu33B110d06b1.pep
MTIHHHMRHQPYIPHNLSRIPSAPIPGQWTSGLCHCFDDPVNCAITCVCPCITFGQITEIINRGSKSCVSRGFLFGMLSMVGAACFYSCFSRSKLRXQYDLPEEPCTDCSVHSCCSACALCQEYRELXNRGLDMGXGWEAHMDRQKRGVTM

SEQ ID NO: 116090 - protein, 35 aa, Gossypium hirsutum
  Clone ID: uC-gsronu33B110e03b1.pep
PIRASCTVSCTVSCFFSIPLVIYFLFYLWFEYSII

SEQ ID NO: 116091 - protein, 82 aa, Gossypium hirsutum
  Clone ID: uC-gsronu33B110e06b1.pep
LLLFTFGRGRRGCPGVVLGSLMTTMLLARLLQGFDWSIPTNQGTIDLCPGRGVPFLAKPLLAVAKPRLLPHVYSFSTESEIQ

SEQ ID NO: 116092 - protein, 116 aa, Gossypium hirsutum
  unsure (1)..(116): unsure at all Xaa locations
  Clone ID: uC-gsronu33B110g07b1.pep
MFKKAVEAKAQQRLSGADRKKLKRTIRDRFPRASDADIDALLPPKAEITVSKFQNRVHVYGVEGGFPLFFNVDGRGSEIYPTVFALWELPEMLPYFMLKXGEVSRSVIGGADLMFP

SEQ ID NO: 116093 - protein, 65 aa, Gossypium hirsutum
  Clone ID: uC-gsronu33B114h03b1.pep
INSFFFLAFLCCFWLSFSFFFLLVFFMVTGLWCEVCIFAFFKFIFYLFLIWFSKMIKKLEQILGA

SEQ ID NO: 116094 - protein, 84 aa, Gossypium hirsutum
  Clone ID: uC-gsronu33B116b08b1.pep
MLYQKRYPITYTMPVPDAVARHHTHPVGPSQCCSAVVQQIAAPVSTVWSVVRRFDNPQAYKHFVKSCHVIVGDGDVGTLREVHV

SEQ ID NO: 116095 - protein, 86 aa, Gossypium hirsutum
  Clone ID: uC-gsronu33B116f09b1.pep
KVAQLTQTFSGPKFRSIRLGLETLALSSCCKEFLEASGTSNDVAFHLNRHHQVCRDFSTLPSYITPPSTRKTRQNPALAPSARRHQ

SEQ ID NO: 116096 - protein, 61 aa, Gossypium hirsutum
  Clone ID: uC-gsronu33B116g02b1.pep
GNRLKITDLVSLKLQWNRSNTANLVSLKLQWNRLKLWTNRSYPSEVAVEQIKTNLISLKLQ

SEQ ID NO: 116097 - protein, 65 aa, Gossypium hirsutum
  Clone ID: uC-gsronu33B117a07b1.pep
PTRPPTRPVGLSGLVIGILSNNKSKGSCGLTHHHFLSIGGILCFVHGLFSVAYYVSATAASDEGK

SEQ ID NO: 116098 - protein, 142 aa, Gossypium hirsutum
  Clone ID: uC-gsronu33B117c01b1.pep
SIHKSSNFGHRTSMKQERGMEFPKVYSNSRAVESSEKGEAFGVILSRSRSVSNASTVALRTEKQSSALETAVRRAFSMRRSRSTSSSSCVSKGRRGYYKIFHYFDDPHPFALTEFHNVAIQPRKSKKSSSRIFEACKRLIGF

SEQ ID NO: 116099 - protein, 127 aa, Gossypium hirsutum
  Clone ID: uC-gsronu33B117e11b1.pep
MGNSFGCSASGERLVSAARDGDLEEAKMLLNCNPCLAKYSTFGGLNSPLHFAAAKGHNEIVALLLENGADVNSRNYCGQTALMQACRYGRWEVVQTLLLFRCNVTRADYLSGRTALHFAAVNGHVRC

SEQ ID NO: 116100 - protein, 74 aa, Gossypium hirsutum
  Clone ID: uC-gsronu33B121b12b1.pep
SSSSSQAHPVHPTLNFFLVEIGMVQGRCSAVAATVLLCCLLLHFEEAQSASFTVGGRGEVGPFNAVVLVLYASA

SEQ ID NO: 116101 - protein, 63 aa, Gossypium hirsutum
  Clone ID: uC-gsronu33B121g04b1.pep
KLYSLEFIQLMAEGRNGEAIWVWEVSKERRKKGKVRTTSCGLLCVRERERVLHHRSVKERETG

SEQ ID NO: 116102 - protein, 134 aa, Gossypium hirsutum
  unsure (1)..(134): unsure at all Xaa locations
  Clone ID: uC-gsronu33B125d10b1.pep
RILKGVDSCVTTAMNALLVVPFTYDDIHEALQAMASTKTSSPDGLPVLFYKKYWHIIGQDINIYWLNVLHGGTSLADINNTNIMLILKITNPIRITXFHPISLCSILYKIISKFQSVLNFGVDKAQITFVLSPL

SEQ ID NO: 116103 - protein, 144 aa, Gossypium hirsutum
  unsure (1)..(144): unsure at all Xaa locations
  Clone ID: uC-gsronu33B126g06b1.pep
PRLVKIGIRNYRLLSMLTLGQTPSIPVVSKVPTIILGMGTXFGSPEQSDVLSIAAMVSSRRWPLIFSYGASGRTXSLKLKMIDSFFKXVSDKVDDGIMKEALLDFYTKRKHDQIIIFRDGVSESQFNQVWIKLLRHVGPLTRSG

SEQ ID NO: 116104 - protein, 120 aa, Gossypium hirsutum
  Clone ID: uC-gsronu33B127a06b1.pep
GPGEKAIVFSQWTRMLDINEACLKSSSIQYRILDGTMTFAARDKALKDFNTVPDELVMIMSLKAASLGMNISRACHVLLLDLWWNPTTEDQALDRAHRIGQTSPVTVLRLTVKDTGEDRI

SEQ ID NO: 116105 - protein, 66 aa, Gossypium hirsutum
  unsure (1)..(66): unsure at all Xaa locations
  Clone ID: uC-gsronu33B127a10b1.pep
CFKCCLPMQXXLLNYVGGGIKRVPPPPHFQCFHCVIKICYLLHFLIIADASTLNSRVKVKHSTNSS

SEQ ID NO: 116106 - protein, 182 aa, Gossypium hirsutum
  Clone ID: uC-gsronu33B127f08b1.pep
NHTQVFYFASVVYPMDQQKKTTSGALQAPLTAPSNNPTAAAQALLHNPGAAQALANNPGAAAAAQAFLGNRGATYQPLLNNTHVGQQHMGVPGASISKPSTGEALMKGHTGSHALIRSDRGSMLSLSDDNVMMKQILATHAPDGREFDVRPLLNLVEDILNRATQHVDFLGRVLLKIKSKWK

SEQ ID NO: 116107 - protein, 191 aa, Gossypium hirsutum
  Clone ID: uC-gsronu33B129b10b1.pep
HSSAPCIKKRGGSRKRTSKRKKSTRDVIMSSRSSSSRSLSCSTCPSDSDESGYEKRKGRSERREKYGRSEKVKGGSKRSKGRSRSCSSCSRYNEGSDHSIGERVMEESNTRRLKSVITVVKRENESSRELIADEPKEDVYDYDDYPSCRSNDSNDGCNPRELQQYPHAISETKRPSDDEQVEVSNVRMSSI

SEQ ID NO: 116108 - protein, 161 aa, Gossypium hirsutum
  Clone ID: uC-gsronu33B129b12b1.pep
MGRRPGRCYRYYSGKPYIKSRYCRGVPDAKLKIYDLGKKKAHVDEFPACVHLISLEREQLSSESLEAARICANKYITKTSGKDGFHMRMRVHPWHVIRINKMLSCAGADRLQTGMRGAYGKPTGLVARVDIDQILISIRTKEAQRANAVEALNRSRNKFFG

SEQ ID NO: 116109 - protein, 67 aa, Gossypium hirsutum
  Clone ID: uC-gsronu33B129h08b1.pep
FIFVLFIVNLFIVIEEYVFLLTLKWLELQQIVQSLYKTVKHEQPGSQEATKINKSYQTISNESTDEW

SEQ ID NO: 116110 - protein, 151 aa, Gossypium hirsutum
  Clone ID: uC-gsronu33B134b02b1.pep
HSSAHASAHASALYVNVSYNRISGQIPAEMSKICKSLKFLDVSGNQITGSIPPSIGDLVSLVSLNLSWNLLRGWIPSNFGRIKNLRYLSLSDNNLTGSIPSTFGRLQSLEILEMSSNSLSGEIPEGLVNLRNLTVLLLNNNKLFGQIPSGL

SEQ ID NO: 116111 - protein, 170 aa, Gossypium hirsutum
  Clone ID: uC-gsronu33B134b04b1.pep
CGKKDPGVIPLAQNLSNLMRLVVLYKYGGVYLDTDFIVMRSFKGLKNTIGAQSIDVVSKNWTRLNNAVLVFDMKHPLVLKFIEEFALTFDGNKWGHNGPYMVSRVVRRVEGRPGYNFTILPPMAFYPVDWIKIGGLFKMPKDRAGSRWIEVKVQQLKRHTYGVHLWNKQV

SEQ ID NO: 116112 - protein, 77 aa, Gossypium hirsutum
  Clone ID: uC-gsronu33B134f12b1.pep
NQSYSMENFMELFADRVNMQHRKLVSSTSCPRCGEMAETIDHIFRECPGSLISLLHTRAASSVMNFGLSGNKGPRVC

SEQ ID NO: 116113 - protein, 116 aa, Gossypium hirsutum
  Clone ID: uC-gsronu33B134g06b1.pep
MANISADSPTPLATDAGPDNSSTEDAPSKLSSWTRNLKIPQPFAASQEELTPTGIAGKSTFSRFTSGLGLRSPSKSTTADGNADGASTTTQPGFLGTITKGIVDSSKNAVKAVQVK

SEQ ID NO: 116114 - protein, 111 aa, Gossypium hirsutum
  Clone ID: uC-gsronu33B136b01b1.pep
PPTRPPTRPPGSSSLSKSTFKEMCKGFSIAFEEVYKNQTSWCIPDPQLREDLRISTSLKVVHAYRTFLGRNPAHVDDKCIKHTVEDVEKLLFGLFEGSPRSLRNSRRMMKT

SEQ ID NO: 116115 - protein, 137 aa, Gossypium hirsutum
  unsure (1)..(137): unsure at all Xaa locations
  Clone ID: uC-gsronu33B136b11b1.pep
ARPFFFFXXLKLSLYISRKGCTSHVCNLLQKKKKEFPLMFFFIYDQWHKMGEKMDKKLPVRKDATLTNSLPSGLVQLSSSLFSSCYPCRLALKNCVIAKQGHLQMYKPLRKNEMERRKYDRSDQCIQSKIEECHQFI

SEQ ID NO: 116116 - protein, 109 aa, Gossypium hirsutum
  Clone ID: uC-gsronu33B136e03b1.pep
LLVRPRVREGSFSAHRATMAPATDGAQTRAFQPRFETSFPFFLKNFKSVFIFFSEMEKMINKRTYNHSVAFWDPRTPTTSVDEEGDRFRPRRKRWCRSLPCWYKRCQGS

SEQ ID NO: 116117 - protein, 171 aa, Gossypium hirsutum
  unsure (1)..(171): unsure at all Xaa locations
  Clone ID: uC-gsronu33B136e12b1.pep
ALISDFGLSLLXNPVHAIARLGGYRAPEQAEVKRLSQMADVYSFGVLLLEVLTGRAPSQYPSPTRPRIEDEEPAVDLPKWVRSVVKEEWTAEVFDQELLRYKNIEEELVSMLHVGLACVVPQSEKRPTMTEVAKMIEDIRVEQSPLGEDYDESRNSISPFIATTEDGMLVT

SEQ ID NO: 116118 - protein, 68 aa, Gossypium hirsutum
  Clone ID: uC-gsronu33B136h02b1.pep
NTKCQSFCEFHGIEGHEIQSCEEFKRLLQNMMDNKEIEFFITAKRPIEEKYAHLTINCQVSRIAPTDH

SEQ ID NO: 116119 - protein, 103 aa, Gossypium hirsutum
  Clone ID: uC-gsronu33B137a03b1.pep
FNLKNLVGLDLYGNRFEGEIPKSFSGLKSLRFLRLNNNNLTGSIPRELTSLSNLKVFDVSNNDLCGTIPVDGPFGMFSMPSYANNMRLNGPELKGLVPYNFGC

SEQ ID NO: 116120 - protein, 156 aa, Gossypium hirsutum
  Clone ID: uC-gsronu33B137a06b1.pep
LSRPVNIHQFFRGYTDGRFDAKSWPQILKLKDWPPSNEFEKLLPRHYAEFLCCLPFKEYTNPRSGLLNIATKLPKKSLTPDMGPKSYIAYGVFQELGRGDSVTRLHCDMSDAVNVLTHTVEVKLSHEQLASINKAKQRHSIQDQQEYGMNSKVDRK

SEQ ID NO: 116121 - protein, 122 aa, Gossypium hirsutum
  unsure (1)..(122): unsure at all Xaa locations
  Clone ID: uC-gsronu33B137a11b1.pep
MRSPTRPVKSWVLAVTIVCMSIFWFHLCKADEDLPETGSFGDDPAHRVALALLCKEDKYIYSSCEESSRLSASGNLDARPEYTDXYCSGPCLSETHLVLNCLEYMMNDLVRERLATIHDIRD

SEQ ID NO: 116122 - protein, 152 aa, Gossypium hirsutum
  unsure (1)..(152): unsure at all Xaa locations
  Clone ID: uC-gsronu33B137b02b1.pep
LSTIAFVLKIWPHYLFGEKCHIFTGXKSLKYLISXKDLNLRQHKWLELLKDYDLVIDYYLGKANVVVDALSRKSLFSSXVMNTRLTLFDDGSILAEIKGKLTFLXQISKAQKSDDELQARLVQCETTFDSEFQIGPDDSLLFRGRVCVPKNS

SEQ ID NO: 116123 - protein, 152 aa, Gossypium hirsutum
  Clone ID: uC-gsronu33B137c06b1.pep
MRKDQRSMKEESQKMQSPCLEEVSQGCLHGCCPSPFLNQHEPQTKASKPRNSSAACRRDLASKTTSSIFPNTQFTNHESLPSMQDSFAEFTKAYPQYSDTYRVDQIRSREYYHLSFSDHTCLDYLGIGLFSYSQLPKQECPKYRIASSSFPV

SEQ ID NO: 116124 - protein, 162 aa, Gossypium hirsutum
  Clone ID: uC-gsronu33B137e10b1.pep
RLRVRDGIGNLSNLVELNISLNDFSGSLPDVFGRLRKLESFSASSNRLTGLLPASLVNSAPLLRIDLHNNSLDGPIRINCSAMAQVTSLHLGSNNFQGPVPASLSSCQSLTVLHLARNKLGGVVPFEFRNLHALEFLSLGNTSINNISTALDILQHCKNLTI

SEQ ID NO: 116125 - protein, 25 aa, Gossypium hirsutum
  Clone ID: uC-gsronu33B138a02b1.pep
TQKPTNIILTYNSSTLINQTSKKEN

SEQ ID NO: 116126 - protein, 188 aa, Gossypium hirsutum
  unsure (1)..(188): unsure at all Xaa locations
  Clone ID: uC-gsronu33B138b02b1.pep
FWSFIFLGLIFIFFFRSPSSNPIPQDPSRRSLRTHNWGGPAWEKRVRSSARIRSRNGISVLVTGAAGFVGTHVSTALKRRGDGVLGLDNFNDYYDPSLKRARQALLDRTGVFVVEGDINDSTLLKKLFEVVPFTHVMHLAAHAGVRYAMENPSSYVHSNIAGLXSLXEAXNLLSTPALCGFSSLLRLI

SEQ ID NO: 116127 - protein, 50 aa, Gossypium hirsutum
  Clone ID: uC-gsronu33B138g10b1.pep
LIKLMTIYNRSLNVIRCGIKIFPRTRVEFIHEISIISCNRFVFVINTTMK

SEQ ID NO: 116128 - protein, 140 aa, Gossypium hirsutum
  unsure (1)..(140): unsure at all Xaa locations
  Clone ID: uC-gsronu33B139a10b1.pep
MVTFVSFLQVLLLIRQMEHSNTQSGAAKVSILTIGQQAIMDAYLCLLHLTAGILVESLFNAFATAAFFKFVVFSIFEMRYLLAIWXACRPMNNGEGXETMRRELSVLYXSRFYGILLGGILVMYEFHNFXQPILLLLYSF

SEQ ID NO: 116129 - protein, 52 aa, Gossypium hirsutum
  Clone ID: uC-gsronu33B139h05b1.pep
HDVIANQECQNITLKHHRAFDEIILGPRLIPCRKKAFPRYVKNLSSGPTNHK

SEQ ID NO: 116130 - protein, 83 aa, Gossypium hirsutum
  Clone ID: uC-gsronu33B139h12b1.pep
CCQLPVPDVCYLKLLSSLILVIQFRFIHGFCMFLLMPMKQRMRLNIYCNFGAATLHANQTENGAMKSEEFQRLDLWKDCCSCS

SEQ ID NO: 116131 - protein, 165 aa, Gossypium hirsutum
  unsure (1)..(165): unsure at all Xaa locations
  Clone ID: uC-gsronu33B143d08b1.pep
LIEMPTLNTWGQFWMDYITLQLLNIDGIRTIGSVLGQSIALDYYVRQVDGMVAEFTDINRGMEKTGTFTMDSKKLFQIVGKANSNLADVILKLGLFERSDIAWKDAKYAIIWEFLRDEFELTQRFASLDFKLKFVEHNIGFFRNSSNRKSDXXEWLIIVLISAEI

SEQ ID NO: 116132 - protein, 64 aa, Gossypium hirsutum
  unsure (1)..(64): unsure at all Xaa locations
  Clone ID: uC-gsronu33B143g11b1.pep
LKLHSISLQSFFFIATLQMKPINIRGQSFKIKKKLKLEYTTEVIYRTNLYKNASCSKTRVQVXY

SEQ ID NO: 116133 - protein, 139 aa, Gossypium hirsutum
  Clone ID: uC-gsronu33B144b02b1.pep
HSFLTKLVIKKLEWGNRDDIDAIKAMNNEGFEVIIGTDVTYIPDAILPLFSTARELISSNKSAEKDQAPALILCHIFRRVDEPSLLSAASRYGFRLVDKWAKGSPNNESQSLISSWFPENNFEEHIPTSALNIMYFQIR

SEQ ID NO: 116134 - protein, 74 aa, Gossypium hirsutum
  Clone ID: uC-gsronu33B144d02b1.pep
MSCSLALANSPAVSPPMSLFRDNSPIISPSPEALNLSMTHLKPSSSPSSPCSPMRVRLQKPTTGALVSSSVSTP

SEQ ID NO: 116135 - protein, 96 aa, Gossypium hirsutum
  Clone ID: uC-gsronu33B144f01b1.pep
IRGIFQHFCAVDQPIAQLTRFPHKPRLSPSLAKEEKRFFSIDHGVSIKLAVSFIYMNSSSFRDWNHRGFLLFLLANFVFSFFHFLFLLIRSKNERV

SEQ ID NO: 116136 - protein, 122 aa, Gossypium hirsutum
  Clone ID: uC-gsronu33B144h09b1.pep
LFLFPKNRILGFLFSSFSLVQPFSFFIIFLLLLKFLCSPILFYSQLLSIWSRVIPRLTAIVQYVLIFLTFLSKNSADSHLRFLLSFVEPYPSLSFFLSILLSFQLQSQFCSLFWHFMDNLGK

SEQ ID NO: 116137 - protein, 72 aa, Gossypium hirsutum
  unsure (1)..(72): unsure at all Xaa locations
  Clone ID: uC-gsronu33B145a08b1.pep
KRRSFKLEAKTGCEEFILFTIAYVSYFQYSAXXINYLWFLMFLINCLLFYHGMVLNLLYFYFQVLMIILPPM

SEQ ID NO: 116138 - protein, 107 aa, Gossypium hirsutum
  unsure (1)..(107): unsure at all Xaa locations
  Clone ID: uC-gsronu33B145f08b1.pep
LYENVGAEDYFGRFXYKAGSGGFTPDRVXVYCKCEMPYNPDXLMVQCEGCKDWFHPSCMEMTIEEAKGLDHFLCSDCTSEDDAKRSMNTFPVSASLEPKVEPKRRKR

SEQ ID NO: 116139 - protein, 88 aa, Gossypium hirsutum
  Clone ID: uC-gsronu33B146b08b1.pep
PYTTKKLEIWESQILNPSPRVPSVVDVKQEGTQNSNIFGHGNDEFQASAAAWPQIMPVSPPRPCITSLSCNMIDLSSYKAADHETSVY

SEQ ID NO: 116140 - protein, 65 aa, Gossypium hirsutum
  Clone ID: uC-gsronu33B148b06b1.pep
TSELHILEMICSFSVCSDTRPTKFVPHKMQFLGCIQNVHLVCRSFNRTSDSNFHNENEAARVGPP

SEQ ID NO: 116141 - protein, 133 aa, Gossypium hirsutum
  Clone ID: uC-gsronu33B148c04b1.pep
VLADTAAGWALEGAEKMGIKRAAVLLSGPASMALALHVPKLGEAGILDSDGTLKTDEPITLSEDIPSWSSGELSWSCSDDPVMQKLISAYVSTAAKTFKFAEQILCNSFHELDPSAMKLIPKALPIGPFSTTN

SEQ ID NO: 116142 - protein, 148 aa, Gossypium hirsutum
  unsure (1)..(148): unsure at all Xaa locations
  Clone ID: uC-gsronu33B148c06b1.pep
PTRSFTVASIIVLVSVVHLFLFPVVPSLDYFSARQVQYKCVPINSSLEQSTDHVWENKPQGLNLDHRFPTDLHNGVVYRNAPWKAEIGRWLSGCDAIATEVNIVETLGGRRCKSDCSGQGXVCNHELGQCXCFHGFSGEACSQRLNLS

SEQ ID NO: 116143 - protein, 84 aa, Gossypium hirsutum
  Clone ID: uC-gsronu33B148g06b1.pep
PTRSLGLGVSCWRAIVLSSGVCTHSRAPFLASTYGGWKLESFLFPTRIKMVRFPFPFHYLQYIHVHIFKASTFMYFDRLLVSLV

SEQ ID NO: 116144 - protein, 87 aa, Gossypium hirsutum
  Clone ID: uC-gsronu33B149a03b1.pep
LQDANDMTDFVGPFLDFVPDKRPSAAQCLVHPWIDAGPRLLEPSGSSSKTQVAVSEKKTKEMDDMEAMEVAMGNIAISADSKHAKDH

SEQ ID NO: 116145 - protein, 111 aa, Gossypium hirsutum
  unsure (1)..(111): unsure at all Xaa locations
  Clone ID: uC-gsronu33B149a09b1.pep
QAAVPSFEVTIPLFPATGVVVFYVIIKRQMKXYDXFSHSTIATISAFNIFQWEIQILYYIIKEIIIRPIKPFVKPRIIHNFIFFWVSSRRVKERHCLDERKMREKGIPIWS

SEQ ID NO: 116146 - protein, 124 aa, Gossypium hirsutum
  unsure (1)..(124): unsure at all Xaa locations
  Clone ID: uC-gsronu33B149a11b1.pep
MTCRVSQWIIFIIVCFLSETAFISPSQATVNDLKQSMKEKHLTDFLDRHEQTIKGWHEALHLKMVQREKKVIIEQKKKGGKGGGSYGGGSLLRPRAKKSAANFLHPTTFLRFLXTWLIPTMFFX

SEQ ID NO: 116147 - protein, 63 aa, Gossypium hirsutum
  Clone ID: uC-gsronu33B149d09b1.pep
PKGKKNSRSLGVNLTFFYFCLISFNMRVYFWKKEDPIYIVSFGFYSRRINKNKREKINKKSLL

SEQ ID NO: 116148 - protein, 161 aa, Gossypium hirsutum
  unsure (1)..(161): unsure at all Xaa locations
  Clone ID: uC-gsronu33B149g08b1.pep
LFSHSLRGFKEPPPPQTIFDHDKIIWLGDLNYRLAAGCADTYELLKKNDWQTLLEKDQLRLEQRAGRVFKGWEEGRIYFAPTYKYLTDSDDYVVQTSKSKEKRRNPAWCDRILWKGEGLKQMWYSRGESRFSDHXAGYSLFSVQVNLAKNPNYNARSCPPT

SEQ ID NO: 116149 - protein, 136 aa, Gossypium hirsutum
  Clone ID: uC-gsronu33B150b11b1.pep
PSRPIPSVSSTIQKETHLSFLTSSSSFPSKTKSMKKSWALIDAASWGIGAALLVLILIGSISANSVSEKADVKGMSQLLNRPCDEIYVVGEGETLHTISDKCGDPFILERNPHINDPDDVFPGLVIKIISSPARKL

SEQ ID NO: 116150 - protein, 100 aa, Gossypium hirsutum
  Clone ID: uC-gsronu33B150d10b1.pep
FSRPPTRPIPKGVYKLCHEVDIKCIDLWTAIQQRDDWKTVCFTDGIHLSSEGSKLVGEEILKALAEEPSLCWRSLPTEFDEDSVFDPVDEEGKNINISNL

SEQ ID NO: 116151 - protein, 81 aa, Gossypium hirsutum
  Clone ID: uC-gsronu33B150d12b1.pep
SIASGDVMSNEEAGQVARRLLIRRRRRALMGEVDDRVSPAQAVADNLTAIAIGRSSCDNISVIVVDLKPKRKSPSNAVKKR

SEQ ID NO: 116152 - protein, 69 aa, Gossypium hirsutum
  Clone ID: uC-gsronu33B150h03b1.pep
YCRKKKKKKKKNRRHLTLPNRQKTETDCPTCTEDERTPYSTYAPCTPWPSSIAPGGGPSWELDQPSTRP

SEQ ID NO: 116153 - protein, 156 aa, Gossypium hirsutum
  Clone ID: uC-gsronu33B150h07b1.pep
VIIITIVASSGGHHNNGLNEKTEELMQQQPRSKILVEKRPDLEYEMKSSLDFDAVETVVYEQKEIVQEVKTTVFEAETNVAVVDDGDGGDVFAISKSEWNPPRRMDLSEIPLDVLFPVEKPPASSRFGHRKPVKANPEGGRASKVAKPKRHETLEN

SEQ ID NO: 116154 - protein, 160 aa, Gossypium hirsutum
  unsure (1)..(160): unsure at all Xaa locations
  Clone ID: uC-gsronu33B153c05b2.pep
VLFIEAVSDYEVKEFERAPRFVTQWRNFLSVHVADVLKGAPPLVVQLTWLKDGNAVVGVGINHCLCDGIGSAEFLNSFAELASMSQTKFSEFKFKPKPVWDRHLLNPPPPFRPSRNXIITRPVTPRFDRVPDNFGFMARFSNKNLSHFIHFKKTNPCLVK

SEQ ID NO: 116155 - protein, 85 aa, Gossypium hirsutum
  Clone ID: uC-gsronu33B153d02b2.pep
LILFLLSVKTPSVDFFFISMASLVLLLSELVRHHEPNFGLVAPSTPSSSCGASMSCTAIDASKYEPEIVEEDPQELKVSVDLVWP

SEQ ID NO: 116156 - protein, 118 aa, Gossypium hirsutum
  Clone ID: uC-gsronu33B153e08b2.pep
PRVRPGPANCSFLNILKLDYNSLTGSIPPVLSLLNRIKTFSVSNNLLSGQIPYFNVTLTAEDFAHNPGLCGKPLDPCQLTSKGPKTGIIAGAAVAGLTVAAIGVAIGMFFYYRRVFVM

SEQ ID NO: 116157 - protein, 148 aa, Gossypium hirsutum
  Clone ID: uC-gsronu33B154e08b2.pep
MRRFIPATAVLSEKTKHSLPLRRWRWRCFSQVAQKEFDNKGGVVVPKMPSFDYAPPPYTGPSAAEILSKRKEYLSPAMFYLYNKPLNVVDGKMQYLFDEKGRRYLDAFGGIATVCCGHCHPHVVDAIVNQTKRLQHSTILYLIHAIAD

SEQ ID NO: 116158 - protein, 69 aa, Gossypium hirsutum
  Clone ID: uC-gsronu33B154g02b2.pep
LFVTHLSAPLASLFVYQSLPLSLCLSLTLCREFRWFSETRGIELGFEDVKHLISFCSMPSIFLILVEFL

SEQ ID NO: 116159 - protein, 182 aa, Gossypium hirsutum
  Clone ID: uC-gsronu33B155b05b2.pep
SFSEARENASQVHQLVGMRGLMSDPQEQMIDLPIQSNLREALSLTEYIISCYGARKGVVDTAVRTSDAGYLTRRLVEVVQHSVVRRTDCGTTRGISVSPQKRTLPERIFIQTLIGRVLADDIYMGPRCIAIRNQDIGLGLVDRFRAFRTQPISIRTPFTCRSTSWICRLCYGRSPTHGDLVE

SEQ ID NO: 116160 - protein, 66 aa, Gossypium hirsutum
  Clone ID: uC-gsronu33B155f05b2.pep
RSFCHVVPNKTNKLSADKKAFCTMDYGDKQHGFFLGSYPSAGDARVPFIHSQRFIDWNKGFCGSKP

SEQ ID NO: 116161 - protein, 170 aa, Gossypium hirsutum
  Clone ID: uC-gsronu33B155f07b2.pep
SIASAHASAITAPLIRNHQLDTFYYIGLTGISVGGELLPIPESAFQMDESGNGGIIVDSGTAVTRLQSDTYNVLRDAFAKGTKNLPSADSVALFDTCYNLSTKSSVDVPTLSLHFPEGKVLPLPAKNYMIPVDSVGTFWFAFAPTSSSLSIIGNVQQQGTRVGFDLGNFA

SEQ ID NO: 116162 - protein, 67 aa, Gossypium hirsutum
  Clone ID: uC-gsronu33B155h08b2.pep
QVKVIRSTLKQLLSSCHSNLTFTSRFTVLVAQKVQPGPFFGLKIHLQVTSSVNSTRKIAPTRPPTRT

SEQ ID NO: 116163 - protein, 58 aa, Gossypium hirsutum
  Clone ID: uC-gsronu33B156a05b1.pep
NNKYQHQCIEILEKDNSDSKDLKSMVVIKIRQPPFSLFKHLICLIPNVSPQSSSFFQP

SEQ ID NO: 116164 - protein, 153 aa, Gossypium hirsutum
  Clone ID: uC-gsronu33B156e01b1.pep
PCFRFDGQAKYPLNLGTTNSGALISAKGVQYLERKVCVMKPSVRLDDPQVEPSVSFACGLADCTCLGYGTSCGNLDAWGNISYAFNSYFQKNNQREDACKFPNVSMITKADPSPRDGNCKFNIMIQPYYGSAGWYARKPLGLTFVLLIFSLVL

SEQ ID NO: 116165 - protein, 95 aa, Gossypium hirsutum
  Clone ID: uC-gsronu33B157a07b1.pep
MDWFSWLSKTGLDPSLVYEYALAFSHNELEEEDIVYFNHEFLQSMGISIAKHRLEILKLARKERGLTPRPVFRLLLAFQRTKWSLGKYIRTWVRR

SEQ ID NO: 116166 - protein, 69 aa, Gossypium hirsutum
  Clone ID: uC-gsronu33B157d03b1.pep
QSLIREIKHTANPFIYNILRLIPSVQPITHILQPFITFPDLTTFLGYCQTFILIPNKSQHISNNIKIIH

SEQ ID NO: 116167 - protein, 69 aa, Gossypium hirsutum
  Clone ID: uC-gsronu33B157e11b1.pep
SFSIGFQNFRPHVSGRFFLFDTPSNYVLYATTFLIIYLSLLNPVINAFNFFITKYFTDENVPHASADAW

SEQ ID NO: 116168 - protein, 103 aa, Gossypium hirsutum
  unsure (1)..(103): unsure at all Xaa locations
  Clone ID: uC-gsronu33B157f02b1.pep
CLSGKWHVSLFAMILYEMLEGEPPFSNYEPYEAARYAAAGHTTFFSFKXYLSELRDLTDNXWAVDMNQRPSFLYILKRLEKMYEKKCLLRSLCEDIQYIVFKI

SEQ ID NO: 116169 - protein, 218 aa, Gossypium hirsutum
  unsure (1)..(218): unsure at all Xaa locations
  Clone ID: uC-gsronu33B157f11b1.pep
MRPKYSGKYLRKTICMVLGDRRLHETLTSVVIPTFDIKLLQPTVFTTFEAKMDPSKDALLSDICIATASAPTYFPAYAFHTKYSEGTDREFHLVDGGIAANNPALLALKPTGVAFPSEQEHEVSQGQALNYENHLIISLGTGTSKMGKKYDAKTAEKWGILGWLYSEGSSPLVDAFTYAGADMVDLHMSLIFKGIKSEHXLSRIQDDKLSEDDSSTDK

SEQ ID NO: 116170 - protein, 86 aa, Gossypium hirsutum
  Clone ID: uC-gsronu33B158a02b2.pep
LFLGLGPKVLLTRCWPQSRVTGRSKSFVFVLHNWKPLSKKEDSKKVKSRLSRTDIKGFSSLNICWRDCRSNFKRPGLTFITMPLPK

SEQ ID NO: 116171 - protein, 96 aa, Gossypium hirsutum
  Clone ID: uC-gsronu33B158g08b2.pep
EQEEGLKPKLKALHWDKVRASSGREMVWDHLRSSSFKLNEEMIETLFVVNPNSKPNQTTPRTVLTSPNQENRVLDPKKAQTIVSFLKALNVTVVEF

SEQ ID NO: 116172 - protein, 170 aa, Gossypium hirsutum
  unsure (1)..(170): unsure at all Xaa locations
  Clone ID: uC-gsronu33B158h12b2.pep
SCVRPRVREKYWDIQSLEYLGLNAIGLKGQSPAFLARLKNLKLLYLGYYNSYDGGIPHEFGSLSQLQLLDMAACNLTGEIPVSLSNLKHLHTLFLQQNNLTGRIPPQLSGLISLKSLDLSINELTGEIPLSFSALQNITLINLFXNNLYGPIPSFCGDFSHLEVLQPGGN

SEQ ID NO: 116173 - protein, 135 aa, Gossypium hirsutum
  Clone ID: uC-gsronu33B159f02b1.pep
DLIGCPSFPLSPSFPPSFICLFSFVYLYAFFLCETVEFSRYRYRFLNRRVFTYFLVCLSVFRLYRRPILIFIWSKNILSFLYSQFNIDGYFITYICPSYSQFSQAIWWNTRRVDSFFRLSFCLYEWKTKERSLSL

SEQ ID NO: 116174 - protein, 100 aa, Gossypium hirsutum
  unsure (1)..(100): unsure at all Xaa locations
  Clone ID: uC-gsronu33B160f10b1.pep
LLTLLCLLQHEIFNFSLEIGKPRLHNKMEDDFLSTYLVAYIEKERAEEFSILFLXKKKKKKKKKKKKKKKIKKRGGCLEESKAYFPFPREEKTMLLGNVN

SEQ ID NO: 116175 - protein, 93 aa, Gossypium hirsutum
  Clone ID: uC-gsronu33B162a03b2.pep
LLVRQNLAVRVGESSQKPKYLAIKLLYQGGQTEIVAIDVAQVGSSNWNFMKRNHGAVWDTSRAPNGALQFRFVVTSGYDGKWICSKIFFPVFM

SEQ ID NO: 116176 - protein, 96 aa, Gossypium hirsutum
  Clone ID: uC-gsronu33B162a09b2.pep
MGVEFENSNCTNLVFTYGTLKRGFANHVLLQDLMRTGDAEFKGTYRSMGRYPAGWGPIPRVLFFLKMVGLGLRVTEELYAVSARGLDRLDKLEGTS

SEQ ID NO: 116177 - protein, 58 aa, Gossypium hirsutum
  Clone ID: uC-gsronu33B162d08b2.pep
IFHDMQPILTSIKTRNMITVGKNVIIQWKIKKRQLIFRAKIIHYAPPPFFISTLLKIT

SEQ ID NO: 116178 - protein, 50 aa, Gossypium hirsutum
  Clone ID: uC-gsronu33B162d11b2.pep
TLLIIDLSTNVFKLDLSIGCINLILDHVNSSLIFSDAWADAWADAWADAW

SEQ ID NO: 116179 - protein, 59 aa, Gossypium hirsutum
  Clone ID: uC-gsronu33B162h03b2.pep
MGPLINPAPLNGPPLFFFFFFFFFFFFFFFFFFFFFFFFFFFFMRYSISLKGIAIGDCI

SEQ ID NO: 116180 - protein, 141 aa, Gossypium hirsutum
  unsure (1)..(141): unsure at all Xaa locations
  Clone ID: uC-gsronu33B163f06b2.pep
TQYRQSTVSTSKTFLKRPTDFEKTVEKVKEMGFNPPSMSFVLAVTVLNFMPKSSWDRKLDVYKKWGWSEKEVIEAFRKNPSYMIVSEEKTVRRMDFLVXEWDSTSVIARRPRVLTXSLEKRIVPRGLFGRDLLSKGLVKKE

SEQ ID NO: 116181 - protein, 64 aa, Gossypium hirsutum
  Clone ID: uC-gsronu33B163g06b2.pep
KSKIKPLMVDFGILSQNLVPKCFSTCFSVIRRFLNLSLSFVMDFSCLNEFCENRLKNIEKCQYD

SEQ ID NO: 116182 - protein, 55 aa, Gossypium hirsutum
  Clone ID: uC-gsronu33B164b12b2.pep
ICLSLPHNKPPQELKQLLISPPRSKQWLWKRCRHRHYQQTTTHLDRHHRNIDLTC

SEQ ID NO: 116183 - protein, 152 aa, Gossypium hirsutum
  Clone ID: uC-gsronu33B164c11b2.pep
FSRPPTRPPTRPVFTMDSIQGLPSGGAATVATSVMPASLHDFLEVVFQDNENTLQSWHLDGYDFWVVGFGSGRWNPHKRKTYNLVDALTRHTTQVYPNSWTAVLISMDNQGMWNLRSAAWGRQYLGQQFYLRVFDPVRSLTNEYGIPSNVLL

SEQ ID NO: 116184 - protein, 64 aa, Gossypium hirsutum
  Clone ID: uC-gsronu33B166a07b2.pep
LIICAYHDRYYGGLRVKCVLQSRHWSASQYNCYALQQKLTIPFLFSSRTSSPRINHKKENSFLV

SEQ ID NO: 116185 - protein, 61 aa, Gossypium hirsutum
  Clone ID: uC-gsronu33B166g05b2.pep
RLDIGFCQFPVLLLISLPPIPFLVASVFLLQCLSFDIGSKRMLFLPHIKKKIFLISLFTTN

SEQ ID NO: 116186 - protein, 99 aa, Gossypium hirsutum
  Clone ID: uC-gsronu33B167a09b1.pep
EFNLKLVLFFFFFFFFFFYFFFFFFFFFFFFFFFFFFFFFLMKKQCKIHQATSTRTGCLSYKEAINSRIHFTISASKAGPSISKWPAPSIKPDAWADAW

SEQ ID NO: 116187 - protein, 157 aa, Gossypium hirsutum
  Clone ID: uC-gsronu33B167c08b1.pep
LWQVEVPQNRGNKRMQRWHFVSTSVMIVRLWSSWLVRETTEKIDFAPEGVTKLHLDAPDDKLMEFIPKFDVIVISSGHWFAKQSVYVLNNEIVGGQLWWPNGSPPMKVNNVDAFGISVGTIFFAIFTHPNYTGLTIVRSFSPDHYEGGAWNTGGSCT

SEQ ID NO: 116188 - protein, 177 aa, Gossypium hirsutum
  unsure (1)..(177): unsure at all Xaa locations
  Clone ID: uC-gsronu33B167c12b1.pep
SVSIGFNLIEHVLCHIVRKERPGAVLVFMTGWDDINSLKGQLQAHPLLGDPSKVLLLACHGSMPSSEQRLIFEKPEDGVRKIVLATNMAETSITINDVVFVVDCGKAKETSYDALNNTPCLLPSWISKAAARQRRGRAGRVQTCECYHLXSQMFYDTFADYQLPELLRTPLQSLCLQ

SEQ ID NO: 116189 - protein, 53 aa, Gossypium hirsutum
  Clone ID: uC-gsronu33B167g08b1.pep
CVYQLPLLSSCLPSSMFVLSNIKFCSTIYQKSSLFFAYIINVNNLGKNNRTNG

SEQ ID NO: 116190 - protein, 144 aa, Gossypium hirsutum
  unsure (1)..(144): unsure at all Xaa locations
  Clone ID: uC-gsronu33B167h04b1.pep
FSLCHLSDQVLGLTPHSDATLITILLQLNDVHGLQVRKDGNWVPVKPLPNAFILNVGDILEILTNGTYRSIEHRATVNPXKERLSFATFIGVGAGGEIGPAPSLVSKQKSAMFRRVKVEEYYKGMFSRKLQGKSYLDYMKIEQD

SEQ ID NO: 116191 - protein, 122 aa, Gossypium hirsutum
  Clone ID: uC-gsronu33B167h06b1.pep
ALNFFISKEVRDQDIAYGLPGISLQGHEIAWWRMKENWNSIINKHIGGLLTHSIPDIISPFCINEKADEVEEFFQSRVTTSFALNSNQSFEHVRIKARLLEAYSRAATLLRPTLAISLYGML

SEQ ID NO: 116192 - protein, 168 aa, Gossypium hirsutum
  Clone ID: uC-gsronu33B168a05b1.pep
PFFRWILISGALGGICIFGPFISFQAYGYYNMCLGRSSDEMRPWCKARIPLLYNYIQSHYWGVGFLRYFRFKQLPNFLLASPILSLAVCSIIYYAKSRPEIVRSLGFQASVEEKRIMAVIFSSQKPQRSNDTQLSEKYSSRKQRNHNLKSRKKISQGEDLAEGTYDHG

SEQ ID NO: 116193 - protein, 166 aa, Gossypium hirsutum
  unsure (1)..(166): unsure at all Xaa locations
  Clone ID: uC-gsronu33B168d05b1.pep
MYKCDGCNDYGKVXKRLTIRWAPNILTIALKRFQSGRFGKLNKRVSFPETLDLSPYMSESEDGDDSNIYKLYAVVVHVDMLNASFFGHYICYTKDFSGNWYRIDDCKVARAELEEVLSQGAYMLLYSRVSARPSCLRTSGINSEADHCLKEQIECVPGKEFISSPS

SEQ ID NO: 116194 - protein, 140 aa, Gossypium hirsutum
  Clone ID: uC-gsronu33B168g07b1.pep
MVKYSQEPIYPAKSAKARGNNLRVHFKNTHETASAIRGMKLKRAKVFLEHVLAHTEAVPFRRFNGGVGRTAQAKAYNTCTQARWPKKSVEFLQRLIQNAEANAESKNLDVNTLYISHLQVNRAPKQKRRTYRAHRRINPY

SEQ ID NO: 116195 - protein, 104 aa, Gossypium hirsutum
  Clone ID: uC-gsronu33B168h06b1.pep
KGILSFSCDNHSHEGEYQRAQFTYEGRQLRFDHTAIFYLLTANLSFHSTSRAVLEITAAKHIKTRGRGMIQNESHSYSCFAPFGSFSKFSHTICTIVLHKAALR

SEQ ID NO: 116196 - protein, 89 aa, Gossypium hirsutum
  Clone ID: uC-gsronu33B169b03b1.pep
IIQCYMNESGASEEEARDHIRKLIDAAWKKMNKDQMAKSPFSYTFIEVAMNLARISLLMYQNGDGHAIEDKETKDRVLSLFGNPISLPK

SEQ ID NO: 116197 - protein, 108 aa, Gossypium hirsutum
  Clone ID: uC-gsronu33B169c04b1.pep
METLPFVFSLAAAIFAYALWFHIIARRLTGPRVWPLVGSLPSLFENRRRIHDWMASNLRATGGLATYQTCTIALPFLAWKQGLYTVTCHPKNIEHILKNRFDNLPKGP

SEQ ID NO: 116198 - protein, 183 aa, Gossypium hirsutum
  Clone ID: uC-gsronu33B169c11b1.pep
PVSLGPIPALHSLMMSVVSAIIFAGILLSTAAEIKETRWFWRRTKTPFQWLLCFPLGTRPSGRVFFWSYIFYLSRFLHMFRTIFSIFKTRKLTFFHLFNNSILTIMSFIWLEFSQSFQVLAILFTTLVYSAVYGYRFWTAIGLRSACFPFVLNCQIVLLSCNLVCHIGVLTLHFMKGGCNGIG

SEQ ID NO: 116199 - protein, 162 aa, Gossypium hirsutum
  unsure (1)..(162): unsure at all Xaa locations
  Clone ID: uC-gsronu33B169d10b1.pep
MGLQSQLNDVSSDSIPLLLVAIIANCVGYLRRLLFASLHLIGLLPCPDQPTTIDDVGVLGSGLASLIVLAEQLNLNKAFSYKYCGGGVGKGSDCVVCLCSLRDGEQVRKLDCCHVFHKDCFDGWLDQLKFNCPVCRSLLKIDQRVGFTLRRVXQDCLPGFFW

SEQ ID NO: 116200 - protein, 88 aa, Gossypium hirsutum
  Clone ID: uC-gsronu33B169e04b1.pep
IYPSPIYPSKPFRLSAAAAASFPALAPQQLSLCTNSHQPRISRTSPSHSPGTLIQYTGGSAPSWRRRRRCGRSKKGLKWCKGGCGKRK

SEQ ID NO: 116201 - protein, 174 aa, Gossypium hirsutum
  Clone ID: uC-gsronu33B170b08b1.pep
FCYFNNYSLTQPRHFCKTCRRYWTRGGALRNVPVGGGCRRNKKKKSSSSSKPSGSAERQSGSNSINTVIPSEITAHLPHQTPHLPFMASLQNFSQYGIGNIGLNFGGIHGQIGATSGGSERSDMGFQIGTNSDMSNAILSVRSGSHQQFPFIEPTNGLYPLQSEYIGASPSMVE

SEQ ID NO: 116202 - protein, 146 aa, Gossypium hirsutum
  Clone ID: uC-gsronu33B170c03b1.pep
METKHPKLEKPDQIVWSLEEEDVSVHSKSYTCSFCKKGFSNAQALGGHMNIHRKDRAKLRESFEENVLSSDITLDRVQVQVQDRYLISEIILESSGEKKVSRDDNGSGASPKGKDGVGENSGSSHGSSSQVELDLELRLGPDSRAS

SEQ ID NO: 116203 - protein, 86 aa, Gossypium hirsutum
  unsure (1)..(86): unsure at all Xaa locations
  Clone ID: uC-gsronu33B170e04b1.pep
TLKGRKEMDPVTAHGRPVPPPFLTRELHLNPHHQFLNHRQQYNSEDEPNRGKKRDRXEAAATTTNDTSESKEVAIYEGEITRKPRG

SEQ ID NO: 116204 - protein, 139 aa, Gossypium hirsutum
  unsure (1)..(139): unsure at all Xaa locations
  Clone ID: uC-gsronu33B170f08b1.pep
MLEYEWGNPSSIMLSGEETAQEPDPNRQLFHHYATTTTTTTTHHQPYNETLLSHHNPTVFSHQNLFHNPNQAQPPQHPATLHSLYDPHSYSATXAYSTTHASLLSLDPVFAVRGSGGGYFLVPKTEEVSRPVDFTAKIG

SEQ ID NO: 116205 - protein, 151 aa, Gossypium hirsutum
  Clone ID: uC-gsronu33B171e05b1.pep
PDVMDPLLPSDSEGNSPAVYLEARSPTWQREADPSPRSPDEWEHVAAHYCPVPEREQPAASGTREPDEGDEPHPAAYDSASEGSQVEQEACCDDDADGVPDKPLARAAPVSAVPASVAADSSEQPVRLNVEGQVFYTSASTLLKFPGSWLA

SEQ ID NO: 116206 - protein, 172 aa, Gossypium hirsutum
  Clone ID: uC-gsronu33B178c06b1.pep
FFFNLLSLWLIDVPKLTSLGFENYFEFHCLAYLELRDCPLLKTFISKCVPGDEPQIGQHVQASNLEVHNSSLLNEKVVFPSLKNLWIQNCGSLEEIIELQGLIPDESQSTSAAQSIVAETVTTKFVFPKLINLGLDKVPRLKSFCSRMHTTLWPSLKHMSVIECPKVQIFTR

SEQ ID NO: 116207 - protein, 46 aa, Gossypium hirsutum
  Clone ID: uC-gsronu33B178d07b1.pep
YLFLLYSPRIIVLFHFVIWNSCLNSYETFVFCIFFIFLKSYFTLFP

SEQ ID NO: 116208 - protein, 135 aa, Gossypium hirsutum
  Clone ID: uC-gsflmaxxa002e06b1.pep
VLRLKVREAAKRQRGQGREPGAWAIAGHGGAGLDPNLPKERQEEAKGLLTRCLDIGISAIRSNLHDIDVDELVTRELETGPLYNSGRGSALTESGTVEMEASIMDGPERQSGAVSGLTTDEKSVSLARLGMGKGP

SEQ ID NO: 116209 - protein, 110 aa, Gossypium hirsutum
  Clone ID: uC-gsflmaxxa002f03b1.pep
VVPFFSKLPRELNFIFFQIDVKWLCNYGFVEENKKPTKKKKGKVFSLSLVASNGLQCREKDDEIPCFVFFLYALIFFTLLSLSELLFKKKKLNECCFRPGYQFMKRLAEI

SEQ ID NO: 116210 - protein, 176 aa, Gossypium hirsutum
  unsure (1)..(176): unsure at all Xaa locations
  Clone ID: uC-gsflmaxxa004f12b1.pep
LVPNVVSYNNLINTHCDRGEVDIAIQVYHEILEKAPFNPSPVTYRHLTKGLIDAGRIGEAVDLLREMLNKGHGADSLVFNNLISGFLNLGNLDKANELFDELKERCLVYDGVVNATFMEWWFNQGKDKEAMESYKSLLDRKFKMPPPTCNTLLEVLLKHGKTKEAXTLFEDMXDNH

SEQ ID NO: 116211 - protein, 73 aa, Gossypium hirsutum
  Clone ID: uC-gsflmaxxa010a09b1.pep
RHYTVKNKSYHVMSSQVQGLSNSSCHSHSTSPQSVEYWQQIEACPFHLYFYQIPLSLPDSGSIPDYHMPFYLL

SEQ ID NO: 116212 - protein, 76 aa, Gossypium hirsutum
  Clone ID: uC-gsflmaxxa014a06b1.pep
HGFGHILGGGVISHLLRFTWGTQVGTRILAFDRSFLLAEKIYKGLSVIPIRVSLNPRLILLTLAMVVLVDFLTDSC

SEQ ID NO: 116213 - protein, 95 aa, Gossypium hirsutum
  Clone ID: uC-gsflmaxxa014b03b1.pep
SLEQGFKQGKHLHPLSVQLTTPNLNFERCPNKTYLEFINQNLPSLLSLNQIHLSASKRKQKHSLFSSLLFSSLQTKDQHWRSLNAFRISQQNAAQ

SEQ ID NO: 116214 - protein, 98 aa, Gossypium hirsutum
  Clone ID: uC-gsflmaxxa026f02b1.pep
LYLIFFLNHPPHSSVAITPKSLQTLVSICRTEPRLADFSFSFSYFFWLLYIFIRIYFVLFLRWLINLINFILNTVSSILLIISKCSYLVLLNCNVVII

SEQ ID NO: 116215 - protein, 70 aa, Gossypium hirsutum
  Clone ID: uC-gsflmaxxa026g08b1.pep
RKAGRLGPFYLLSTHAFFTLPWTRGPIFPADSFFFFLFTDKNLNPNYLKCLDFQCFLHVRLGLDILSVSF

SEQ ID NO: 116216 - protein, 142 aa, Gossypium hirsutum
  unsure (1)..(142): unsure at all Xaa locations
  Clone ID: uC-gsflmaxxa027f10b1.pep
ESEINSFDDFHAAILDILNVISTALPXKHYDAPSRREVEKCFKAWENEKDPEKKKKIFMKFIQEIKLSQLDNTTIITGIVTPPAAMAAKKAGEFLPHLSVIKTIPDVVFVPSVTMATLVISKLSRRLLRAKRHPCANKISVL

SEQ ID NO: 116217 - protein, 91 aa, Gossypium hirsutum
  Clone ID: uC-gsflmaxxa029e06b1.pep
FLHILNANVIYRDLKASNILLDSDYNAKLSDFGLARDGPTGDNTHVSTRVVGTQGYAAPEYVASGRLTPKSDVVCLVVVLLKLLSCQSVNF

SEQ ID NO: 116218 - protein, 64 aa, Gossypium hirsutum
  Clone ID: uC-gsflmaxxa029e12b1.pep
QIWLDAGDYGNERICKARKRFRKINGRSQATVSIMDLAMKNRVPKAHFFPMKRIFFLLKTKHKS

SEQ ID NO: 116219 - protein, 70 aa, Gossypium hirsutum
  Clone ID: uC-gsflmaxxa029f07b1.pep
PLSISSHCHSSSFLLPKHKQLTVWPLISFPSTCINCSRYQSSYILQKYKPRHLQIKTTPLSLFLSISLIK

SEQ ID NO: 116220 - protein, 129 aa, Gossypium hirsutum
  unsure (1)..(129): unsure at all Xaa locations
  Clone ID: uC-gsflmaxxa029f08b1.pep
THVKRPSVGICSQIEKLASCNWYREALELFDILELEGGFDVGLSTYDALVSAXIGLGSVPAVNRVFSYMISNGFEPDXYMSNRVLIMHVKCRMIGYARXVYFDEMPEGNMVHGIPSKLDWSMLGILLGL

SEQ ID NO: 116221 - protein, 125 aa, Gossypium hirsutum
  Clone ID: uC-gsflmaxxa029g01b1.pep
RTLGLLSSFNLVLLASELLLGWLPLQGLVRPDRLLYYSSALHLLIYAQDNQESIVNKEENLMDESPFLKLKRWQWWLLVAINIFFLIAGQAAAVLLGRFYYDKGGNSKWMATLVQTAGFPVLCIP

SEQ ID NO: 116222 - protein, 50 aa, Gossypium hirsutum
  Clone ID: uC-gsflmaxxa029h03b1.pep
HPCDLLYRSLNPDYYLDDDLKTFLGLNIKSKTRDWYFFFHYIQTRTNLKA

SEQ ID NO: 116223 - protein, 83 aa, Gossypium hirsutum
  Clone ID: uC-gsflmaxxa029h07b1.pep
PTRPPTRPVILQDFGWYDFILKLHKLYNGTHLSLNNVTSRNVYTIEVDEISGGGNIFIQSDGEHLGFLPRKLSILPGAIEMIC

SEQ ID NO: 116224 - protein, 132 aa, Gossypium hirsutum
  Clone ID: uC-gsflmaxxa039b02b1.pep
MASDTTDSHRRKHHRSPSDEEETDKSSKRHKHRHHKHRHHRHRSKKHEDEARDGGEDPLPPPSIPRPDDDVEEGEILDEEPTAEIKADQSRDGRDVSDPGAGENSNSVDEQVRGIGDKSEDRKHNHARLSGN

SEQ ID NO: 116225 - protein, 81 aa, Gossypium hirsutum
  Clone ID: uC-gsflmaxxa039c08b1.pep
PRVRPRVRQMAKGSKGRRRTAFRQFRPTPYSLSSRRQGISGDLYHKNCSKPLDKKDWEDVTCSVCMVCLNIAVPFSWLAHV

SEQ ID NO: 116226 - protein, 53 aa, Gossypium hirsutum
  Clone ID: uC-gsflmaxxa045d01b1.pep
LCPILTARCDMKGEHLKVLMSIRPTMGNGLFTMDDHWHFRAHTVANIMIYNLS

SEQ ID NO: 116227 - protein, 77 aa, Gossypium hirsutum
  Clone ID: uC-gsflmaxxa046a03b1.pep
MEDLKKRKMEEMGNNDQLSTQEELRSLLDPLAKSQLVDLLSRLGSQYPSIAEEIKSIASSDPVHRKLFVRGLAWNTT

SEQ ID NO: 116228 - protein, 170 aa, Gossypium hirsutum
  unsure (1)..(170): unsure at all Xaa locations
  Clone ID: uC-gsflmaxxa046d03b1.pep
MPLLSDNSTSSARLSAENAEAERRLREAEERLREAMEELHRRQRKAACGDSPPCDHADDSCVANAIGNLCQSFLLSYGVRVGIGILLRGFKLARGKSYSSLLDLKQLVSEKDLIVREEACRIGLLFGGFTGSYHALRCLLRKRRKKETPLNAILAGCIAGLSIXALDDPN

SEQ ID NO: 116229 - protein, 173 aa, Gossypium hirsutum
  unsure (1)..(173): unsure at all Xaa locations
  Clone ID: uC-gsflmaxxa046f05b1.pep
MSEVFEGYERQYCELSDNLTRSCTSASVLHGELKKQKLSEIKEGLDEADALIRKMDLEARSLQPSIKATLLAKLREYKHYLNNLKTDVKRITSTDTNQAARDELLESGIDGTMTVSADQKGRLLMSTERLNQSTDRIKESRRTMLGTEEAGVXILQDLHNNANXLLHAHTRSM

SEQ ID NO: 116230 - protein, 168 aa, Gossypium hirsutum
  Clone ID: uC-gsflmaxxa046f11b1.pep
RTRGLYPFYNQTAVSVSVPPPPLTPPAITPGKSKKTLPIIIAIIAPIAVSVLLLLLGCCLLKRRARRKYKAVEEENAKDDISTIESLQYDFSTIEVATNNFSNSNKLGEGGFGEVYKGTLPNGQEIAVKRLSRSSGQGIEEFKNEALLVAKLQHRNLVRLLGFCLARE

SEQ ID NO: 116231 - protein, 129 aa, Gossypium hirsutum
  Clone ID: uC-gsflmaxxa047c03b1.pep
MLRDYLFFFSFLPSFFIVILSAVSTTASTFITFSIYKALNTIAPCQFFQSFLRRNQIVEISQLRAKSSARKKIQIQLKNTLASGFDFKAIQDKVSLHLRPWHRSFQFWVRAVDIYTRYKFPSLSSSSWW

SEQ ID NO: 116232 - protein, 112 aa, Gossypium hirsutum
  unsure (1)..(112): unsure at all Xaa locations
  Clone ID: uC-gsflmaxxa049a04b1.pep
CLQWNHPETTVRNASVEDFLALLKEWVRLGASFSXSREENLERQSFNSSVNEDFVNDGQEVEDENEDGDGEVFEDREILCXCDGDPNEKGERVLYLRVRWLQGGPEEDTWEP

SEQ ID NO: 116233 - protein, 87 aa, Gossypium hirsutum
  Clone ID: uC-gsflmaxxa052h08b1.pep
KNSRHFIYCTSLSSSRFHLSLRSAMAALSGLCSSSPSLKPKHDRVVIPLVRKYSLAFPTRSNSCSKLSVSGEVSAHLSKTNSVGVLK

SEQ ID NO: 116234 - protein, 57 aa, Gossypium hirsutum
  unsure (1)..(57): unsure at all Xaa locations
  Clone ID: uC-gsflmaxxa067h11b1.pep
MASNIGMMHSAYFVGRNEILTWINNRLQLNLSRIEEAASGAVQCQMIDMTYXGAVPM

SEQ ID NO: 116235 - protein, 60 aa, Gossypium hirsutum
  Clone ID: uC-gsflmaxxa067h12b1.pep
FSTFLLLLNIPTDSLLFSTIHSIPSLFLSVCVSVLLLINPVEINRELHFLNIRRFYIFIY

SEQ ID NO: 116236 - protein, 49 aa, Gossypium hirsutum
  Clone ID: uC-gsflmaxxa069b08b1.pep
DWSIVCHFQCQHGHFAEQACIAPSPLPVTVIQKLQAILGRLIANNRLEK

SEQ ID NO: 116237 - protein, 45 aa, Gossypium hirsutum
  Clone ID: uC-gsflmaxxa069b12b1.pep
AFWRVLYTPSFMDLAHKLLFTALPHLRSIHCWDTFFSPLLPSPFS

SEQ ID NO: 116238 - protein, 44 aa, Gossypium hirsutum
  Clone ID: uC-gsflmaxxa069c10b1.pep
IFASPMDDTHRSSDEYHQPLLTEPSSNDEATILRDEDGEEGKDL

SEQ ID NO: 116239 - protein, 115 aa, Gossypium hirsutum
  unsure (1)..(115): unsure at all Xaa locations
  Clone ID: uC-gsflmaxxa069f07b1.pep
RKKRKNDKRKKEKKKEKKEXKKNKRRKXRRNKGKKEKVXKEIKEKRKKSKIDEGNKREKMRKNRKKKVXRIENNIIKKKREREEKNKEKRKNINKKNRRKSKKEEKRREKNKRYI

SEQ ID NO: 116240 - protein, 52 aa, Gossypium hirsutum
  Clone ID: uC-gsflmaxxa069f12b1.pep
AFFDPLPPPPKKWVPKLKLEDEESITKLSTKSRFRYNSPLVQSLPYRPSMFF

SEQ ID NO: 116241 - protein, 45 aa, Gossypium hirsutum
  unsure (1)..(45): unsure at all Xaa locations
  Clone ID: uC-gsflmaxxa069g01b1.pep
LFSAELLWLQPXXLLDWWARFKTNVFADNESFNLMGKEHALLLPN

SEQ ID NO: 116242 - protein, 45 aa, Gossypium hirsutum
  Clone ID: uC-gsflmaxxa069h04b1.pep
LSQILLEDRFTGGCFIEECADWAYYSNCKSDVGCSNVEDFCSSEF

SEQ ID NO: 116243 - protein, 43 aa, Gossypium hirsutum
  Clone ID: uC-gsflmaxxa070b07b1.pep
LFKDKAMYYLFFELKKDFTVPILDCPYCLVPVLANLIYREASR

SEQ ID NO: 116244 - protein, 41 aa, Gossypium hirsutum
  Clone ID: uC-gsflmaxxa070b11b1.pep
CASSLCLTFAHTKAAPPSETKRTDHLKVSTMFLDDGGAGKA

SEQ ID NO: 116245 - protein, 101 aa, Gossypium hirsutum
  Clone ID: uC-gsflmaxxa070c05b1.pep
MALKRGLSSVGVHRNRSSESRFPIVILVLFSVLAPLVFFVGRGLYISDQNNVQSGYTKQNVDCRERLALQSIKNLFTKEVIDVVTTSTGDLGPLRLDSFRK

SEQ ID NO: 116246 - protein, 121 aa, Gossypium hirsutum
  Clone ID: uC-gsflmaxxa070c06b1.pep
LTGCQKTGGTFCFIGNLSWPTSDRGLKDAFEKFGNLIEAKVAVDKISGRSRGFGFISFDEKAAMEEAIEAMNGMDLDGRNITVDRANPQHGSGRDYDGDRNRGRDRDHDRNRGYDGGRGSN

SEQ ID NO: 116247 - protein, 80 aa, Gossypium hirsutum
  Clone ID: uC-gsflmaxxa070d07b1.pep
FQPFGLFSFSFSSLVPDPHPGSPVFDPSKNRLIGGGGGGYTCGGGFEVGLCWWKTKERHINKIRSLLFILFHFGEVKVFD

SEQ ID NO: 116248 - protein, 137 aa, Gossypium hirsutum
  unsure (1)..(137): unsure at all Xaa locations
  Clone ID: uC-gsflmaxxa070e03b1.pep
QMMSFLAKAMQSPGFLSQLVQQQNESNRHLTGGNKKRRLXRLDEENLTGEHGTIFPNRRIVKFQPSLNEAAKAMLHQILKMNTSPRLEPSIDNPDTFMIDGIPPSNALDSRSCFSRISGVTLVEVPPVSGQSYLQAE

SEQ ID NO: 116249 - protein, 78 aa, Gossypium hirsutum
  Clone ID: uC-gsflmaxxa070e08b1.pep
YFNQIQRLAETANSNHLFSSCRKLKVKVQKLRSKEKTKAVRSIDFVVKAMKKGVCVKQEAPSVFLTKQRKKNQLNRLV

SEQ ID NO: 116250 - protein, 73 aa, Gossypium hirsutum
  unsure (1)..(73): unsure at all Xaa locations
  Clone ID: uC-gsflmaxxa070h02b1.pep
ANPYNSILKTLEKPQVFEFGXNHYSPPALNDPRIDKLPYSIKILFEFPIRNCDEFQVKSEDVENIIXWENTSP

SEQ ID NO: 116251 - protein, 81 aa, Gossypium hirsutum
  Clone ID: uC-gsflmaxxa076b05b1.pep
SVSSLYIHPKSITKKVKKTFLTIGRTIFAYSTWGFHLLLFSVWIFHCKCIVLRTVNEFERSKILVPAWFRLKAQFESSIFG

SEQ ID NO: 116252 - protein, 147 aa, Gossypium hirsutum
  Clone ID: uC-gsflmaxxa076b06b1.pep
MAFTTLRLPPYPKLVTNNRFSGIFASQFHSSALPSRLVLGSSSSCVGTLSLSINHHSSRWSSTTFTCFSQTSELSVSVDTYGNNIIGGGGREHALCYALQRSPSCDAVFCAPGNAGISTSGNATCIPDLDIFDSLAVISFAAMGCCW

SEQ ID NO: 116253 - protein, 149 aa, Gossypium hirsutum
  unsure (1)..(149): unsure at all Xaa locations
  Clone ID: uC-gsflmaxxa076d05b1.pep
MPAIADRSSSPFKAMLAAKSCELAGSGGCCTPQKRRLRSDTALAAKESPVSTPMKLKSPRRRLDSSPSSPANRIKKDPSEKTLKKCWNPRDVEQMRDVKEAVHVSTAPSTVVCREDEQXRVLDFCKACVQQRSWSCCMGCLDWESYHGV

SEQ ID NO: 116254 - protein, 119 aa, Gossypium hirsutum
  Clone ID: uC-gsflmaxxa076e05b1.pep
GRFIPCDSNYIRIVVTRCETMAERSREMNERRGKKGGEKCGRERESSKGIGYFQKRIDLDETPMSLYTHIYIRKQKGINELMYLKLVVTCMTCNDPKCFCSAESSTDSLSSLNKKLLWQ

SEQ ID NO: 116255 - protein, 168 aa, Gossypium hirsutum
  Clone ID: uC-gsflmaxxa076e11b1.pep
VIVRTIPTGGRIRISSTLPNRLGKMLSPLHWHDYKKKYGKLDDFVASHPTLFVIEGDYIWLQEGAQEMIAATAAIAKVAAAAEAPSSYSFLPSVSVTPIAQRNRLKKALRSIDSYHVRENALFKEHAGITKNASNGQQLVMQNQHPNGFVSMCQRFLQCKNIEPIKDV

SEQ ID NO: 116256 - protein, 165 aa, Gossypium hirsutum
  Clone ID: uC-gsflmaxxa076g02b1.pep
YFCFIKVKFPLTSFSLLTASDNGLPLPSSAATPSSLLFSPSNSLSTHSSSHPNPELESHSEPDFATIFASQRFFFTSPGSSNSIIESTPTSTAANQTSNKGHHHTRSTVKDGVAVPTLSSNPYMDFRQSMQEMAEARGLMDVKANWDNLHELLLCYLALNPKSTH

SEQ ID NO: 116257 - protein, 110 aa, Gossypium hirsutum
  Clone ID: uC-gsflmaxxa088a01b1.pep
LFRALEPLYIVGGDLIMEYFVDPILFIFSMFYVAMPNNLTMIPEQITLPHPLCRSQIALVNFACAMVPALPMPQPPPTPADGNGHRHRRRRGHRHRHRHGSHETPEQLYC

SEQ ID NO: 116258 - protein, 65 aa, Gossypium hirsutum
  Clone ID: uC-gsflmaxxa088a07b1.pep
VGESLWWLLCRFRFRLIRLSRVWGVIDKSYIDQLYPTTWIVVYPTLVFIVQPATVDVLTVSKYDS

SEQ ID NO: 116259 - protein, 51 aa, Gossypium hirsutum
  Clone ID: uC-gsflmaxxa088c02b1.pep
TKDDCPTLVTKNDICYTINFHLSRNPIFLILSAAITTYPINLLRTRGRTSG

SEQ ID NO: 116260 - protein, 117 aa, Gossypium hirsutum
  unsure (1)..(117): unsure at all Xaa locations
  Clone ID: uC-gsflmaxxa088f09b1.pep
MGVLLLNSLPLGFRFRPTDEELIHFYLRSKINGNRNDEIEIIREIDVCKCEPWDLPDLSAIKTQDPXWFFFCPLDRKYPTGNRLNRATEAGYWKATGKDRMIKSGSTXDRMKKTLVF

SEQ ID NO: 116261 - protein, 91 aa, Gossypium hirsutum
  Clone ID: uC-gsflmaxxa089g02b1.pep
TLVVAKEKMMCYEEIRQKRVEENKKRMEALNLPQLSTLLHTPSFKPSPRKQMKPRTVEKQLVVVRRSSRVANKPAPVYQEVSEILDSLSWV

SEQ ID NO: 116262 - protein, 84 aa, Gossypium hirsutum
  Clone ID: uC-gsflmaxxa089h01b1.pep
IPSRRSRSPLTCSNTPLSFLFFSFFSPCFLGGTCLKLWVAYRSHNPKTISTHQSSSSFFFFKLIFFCFLVFLLGNLIYFICPKI

SEQ ID NO: 116263 - protein, 85 aa, Gossypium hirsutum
  Clone ID: uC-gsflmaxxa090b05b1.pep
ELEYLKNGEVRSRDRTVFYPHLFLRISLFILFKNRRSSSNFFINKKGVEKGSKRPDFGTSGHHPRRSYGGGLLDLAGLGVEDPQG

SEQ ID NO: 116264 - protein, 175 aa, Gossypium hirsutum
  unsure (1)..(175): unsure at all Xaa locations
  Clone ID: uC-gsflmaxxa090c06b1.pep
SYQRLVGKLIYLCHTRSDIAFGVSVISQFMHTPREKHLEAAYRILRYLKGTPGKGLHSKKDVNRSIEVYIDADWAGAINDRRSTSGYCSYVWGNLVTWRSKKQSVVARSSAESEYRALSHGICEGMWLQQLXERLKLSYTKPITLYCDNQAAVSIAHNPVHHDRTKHVEIDRHFI

SEQ ID NO: 116265 - protein, 161 aa, Gossypium hirsutum
  unsure (1)..(161): unsure at all Xaa locations
  Clone ID: uC-gsflmaxxa090c11b1.pep
RPVPDANLMRGLLTSDVIDLMNLGQRNRAVGATALNDRSSRSHSCLTVHVQGRDLTSGTTLRGCMHLVDLAGSERVDKSEVTGDRLKEAQHINKSISALGDVIAYLAQKNPHVPYRNSKLTQLFQDSLGGQAKTLMFVXISPEPDALVNNKYFKFESVYFR

SEQ ID NO: 116266 - protein, 76 aa, Gossypium hirsutum
  Clone ID: uC-gsflmaxxa090d04b1.pep
SCIIPGDKPLNPIPSSITYTELPPHFPHYLKLVLTSLFFLIKDPQPASVLFSLQYEKLKPFFFCFSRMLEAVMAQP

SEQ ID NO: 116267 - protein, 71 aa, Gossypium hirsutum
  Clone ID: uC-gsflmaxxa090d11b1.pep
TSTCKHKVPSIIRYDYLLHFLEHLSGITKNLSFLNPISSLTTTKKFGVFEWVVLLQRKRKKMVLCHCVKRG

SEQ ID NO: 116268 - protein, 95 aa, Gossypium hirsutum
  Clone ID: uC-gsflmaxxa091b03b1.pep
RRYSLNTMGAKFPSPINSLHNLENQVQALFTKSISFKDVNVKTVMQSFSYNRLVSNSKGLEPNGCGTGSMQLEEPLSYDKKEILSHIKENNTVFC

SEQ ID NO: 116269 - protein, 94 aa, Gossypium hirsutum
  Clone ID: uC-gsflmaxxa091f03b1.pep
WDPRKQGTSAPVFQFSSHSSWISACKWHNTSPLHLLSSSYDGKVMLWDLRTAWPVSIIDTHKDKVLCADWWKGDCVVSGGVDAQLRISSDISIQ

SEQ ID NO: 116270 - protein, 98 aa, Gossypium hirsutum
  Clone ID: uC-gsflmaxxa091g12b1.pep
MGSEAGIVRKPRFLGLHGFRTSGAILKTQIETKWPKSVLEKIDIVYPDAPFSAQGKSDVEGIFDPPYYEWFQFNKEFTTYTNFDECLAYIEDINNKQG

SEQ ID NO: 116271 - protein, 155 aa, Gossypium hirsutum
  unsure (1)..(155): unsure at all Xaa locations
  Clone ID: uC-gsflmaxxa092a06b1.pep
MGGPPYDCLANPLGAVRLAFEKAIGSELETPSTHPSAFNGKDWGALELFRHFLFQESGLSQVPILNPKTLRWVQPNSLVRYRGMIQDMLXNEFYAGAHKDGNLWRTNXFMDVSQYPMGSSPDMXFWERRLLYCVPVPGQXSWTETSSEMEPNWSS

SEQ ID NO: 116272 - protein, 58 aa, Gossypium hirsutum
  Clone ID: uC-gsflmaxxa092b10b1.pep
EFQWPENIQIKARQVHKPILSFNRSKIHPKIKKKKSAIKYFSHEIHTIKSFNTLNLDL

SEQ ID NO: 116273 - protein, 53 aa, Gossypium hirsutum
  Clone ID: uC-gsflmaxxa092g01b1.pep
PDVDTLRERPITFDLFIEEAHKAIVEGVLFIISFIRQEDASSISVACLFFPFL

SEQ ID NO: 116274 - protein, 52 aa, Gossypium hirsutum
  Clone ID: uC-gsflmaxxa093d04b1.pep
RIVISWINIGNRNKLRVSDLRKWVTKYYDAFHLSSLGVGMDYPTKNGVELTQ

SEQ ID NO: 116275 - protein, 122 aa, Gossypium hirsutum
  Clone ID: uC-gsflmaxxa093f11b1.pep
MKKVEIPILFLSSMFLMVVALPIRLPIIPRVRANPPRLVPLCTSQLMLVNYACGTVPLVPSLFLSSNTPDVGNENGNGTRSSQGDGNGIENGAGEGEIKHCLMHIHKHKHRHKEITPVHNYC

SEQ ID NO: 116276 - protein, 83 aa, Gossypium hirsutum
  Clone ID: uC-gsflmaxxa093g04b1.pep
RLSSCSGPSPSSFAPPVTTAFKAVNNSCINQSGLKQHKIAKSSRSSFSASHVPLSLLSVSLARSLHPQYAQFPSLLRIFHPPS

SEQ ID NO: 116277 - protein, 106 aa, Gossypium hirsutum
  Clone ID: uC-gsflmaxxa094b03b1.pep
VESLILQLHEISAVKFGNFKLKSGISFPIYIDLRLIVSYPSLLCQISQSLLSSLPPQIPLNLICGVPYTVLSIVTFISLFTSIFTLMRRIEVNDFCTSQFYFNAFL

SEQ ID NO: 116278 - protein, 32 aa, Gossypium hirsutum
  Clone ID: uC-gsflmaxxa094c11b1.pep
LFYLTQGFCSPKTLISSIANPSHCSFLNLCLC

SEQ ID NO: 116279 - protein, 56 aa, Gossypium hirsutum
  Clone ID: uC-gsflmaxxa094d12b1.pep
NPLPCPISPGFFIKPFIINSAFCLYKDLHFWCKIAPFQLRFMSTFPHKTNYLLLLI

SEQ ID NO: 116280 - protein, 95 aa, Gossypium hirsutum
  Clone ID: uC-gsflmaxxa094f12b1.pep
MFPYWFDCRDDGIYNVLALSDHSLYLLQIDGNVFLFFLLLFLTNFETLLFLSLLSNCVLCFWAPKIKTNKKKKEGTPFVLSLQLLKATLGLGRMK

SEQ ID NO: 116281 - protein, 63 aa, Gossypium hirsutum
  Clone ID: uC-gsflmaxxa094g03b1.pep
LVGLKCILLFCILDPIGSKLVSYSPTHLHKASLYRTTSGKVFYINPVFLFIKSLNERYDGSMK

SEQ ID NO: 116282 - protein, 61 aa, Gossypium hirsutum
  unsure (1)..(61): unsure at all Xaa locations
  Clone ID: uC-gsflmaxxa094g07b1.pep
ISNLLKSEKRLVXRAFELRAELENAASDVSDLPAKIERKDKIEDGNKSLIQKFQPQLTAHL

SEQ ID NO: 116283 - protein, 90 aa, Gossypium hirsutum
  Clone ID: uC-gsflmaxxa094g12b1.pep
RRNQGTFLKSLVITSPALASPTACLKADAEADCGCHCHCSLSQEAYVLPQDDKPCACFGLDRPPQPRLNPGSPPYNQPPIPPHCWAPPHF

SEQ ID NO: 116284 - protein, 56 aa, Gossypium hirsutum
  Clone ID: uC-gsflmaxxa095a03b1.pep
SPSALIWACFHGQAGPSLSSNSIPSPPSSNNLFHRRCPYHRRNPLLKLKRVSIPIP

SEQ ID NO: 116285 - protein, 45 aa, Gossypium hirsutum
  Clone ID: uC-gsflmaxxa095c01b1.pep
SLLPLIANRETFHFFNPGGFAKVCPLQGPSPPAHSGPFLRSALSR

SEQ ID NO: 116286 - protein, 39 aa, Gossypium hirsutum
  Clone ID: uC-gsflmaxxa095g12b1.pep
GPLEDAGNSPSRLFMAACKPVKPVQSSQVGQAWESPIIL

SEQ ID NO: 116287 - protein, 139 aa, Gossypium hirsutum
  Clone ID: uC-gsflmaxxa096a08b1.pep
MANAASGMAVDDECKLKFLELKAKRNYRYIIFKIQDQQVVVEKVGNPGSTYEEFTASLPADECRYSVFDFDFTTDENCQKSKIFFIAWSPDTSRVRSKMVYASSKDRFKRELDGIQVELHATDPSEMSFDIIKARAIKR

SEQ ID NO: 116288 - protein, 128 aa, Gossypium hirsutum
  unsure (1)..(128): unsure at all Xaa locations
  Clone ID: uC-gsflmaxxa096a12b1.pep
MAAHQEAEPSWQELLGSKNWDSLLDPLHFXLRKLILRCGDFCQATYDAFNNDQNSKFCGSSRYGKSSFFDKVMLESASDYKVESFLYATAHVTLPQAFMLHSRSRESCDRETYWIGYIATTFDETSKA

SEQ ID NO: 116289 - protein, 78 aa, Gossypium hirsutum
  Clone ID: uC-gsflmaxxa096c09b1.pep
KVGKGRCFRNIRIPVCFLRLKPTSITKGCNRERNSRSLRFCFFLANVVLFIILCLCRLLSQFFFIILVLGFHFFFLND

SEQ ID NO: 116290 - protein, 183 aa, Gossypium hirsutum
  unsure (1)..(183): unsure at all Xaa locations
  Clone ID: uC-gsflmaxxa096g10b1.pep
VGSSRKRKYLMVIGINTAFSSRKRRDSVRATWMPQGEKRKKLEDEKGIIVRFVIGHSATSGGILDRAIEAEDKKHGDFLRLDHVEGYLELSAKTKIYFATAVALWDADFYVKVDDDVHVNIATLGETLVRHRKKPRVYIGCMKSGPVLSQKGVRYHEPEHWKFGETGNIYXRHATGQLYAISK

SEQ ID NO: 116291 - protein, 162 aa, Gossypium hirsutum
  Clone ID: uC-gsflmaxxa096h08b1.pep
SAVNKELGEREFLEQKNGLKSMISRTGSVSGFEDNILEQVEMPLDCVDLQSRTHIRHGSLCTGVNGRLYSNGIGLEKSVEDRPDDRLLSGVPKGDDKVAQISSSKDMLSDQNTVAFVKQKSLTNQAKRTVETEASGRKDVSMRRTSSYNEAVVSEASFMEIL

SEQ ID NO: 116292 - protein, 83 aa, Gossypium hirsutum
  unsure (1)..(83): unsure at all Xaa locations
  Clone ID: uC-gsflmaxxa097b03b1.pep
TICDREFSIQQQKIDSLTASIPSSLNSIKSLALDTAQNHAKLAKLKANLREAENEFVKVLVARTRXEANQMATRDSISAVKLE

SEQ ID NO: 116293 - protein, 51 aa, Gossypium hirsutum
  Clone ID: uC-gsflmaxxa097c02b1.pep
AFFFCSSPDPIKGTQIYIWVPYGAPFLSQSLCCWKTLKFRPLFFYFSYSLH

SEQ ID NO: 116294 - protein, 146 aa, Gossypium hirsutum
  unsure (1)..(146): unsure at all Xaa locations
  Clone ID: uC-gsflmaxxa097e02b1.pep
HGGIFGPFVIWGLCGFLWVLVWLSATSSTPDRSPQISKYELDYIMNKRQKSHAVESKPKTKMIPPFRRLLSKMPTWSLIVANAMHSWGFFVILSWMPIYFNSVHHVDLRQAAWFSAVPWCMMALTGYLAGLWSDXLIRNGTSITLT

SEQ ID NO: 116295 - protein, 134 aa, Gossypium hirsutum
  Clone ID: uC-gsflmaxxa097e10b1.pep
LFTRPIKNTAGGKTTAAFRTSKAIAVFAKGKTIVALQKNALSLPSAAASGDLLPPPLARHCKTSLTYVGSSVPSGTIYLHFNVVLCSALCLLLSFPLPSVIFVARSSVFAAFYSVHRTLSIFIFSLVIFYLWLD

SEQ ID NO: 116296 - protein, 117 aa, Gossypium hirsutum
  Clone ID: uC-gsflmaxxa097e12b1.pep
MEMGSGSLTDSGGSSSNSSTESLNGLKFGQKIYFEDTSAAGTGGGTTMGTPLKSGIGSSSSSGSGKKAMGGVVQGGQPPRCQVEGCKVDLTDAKAYYSRHKVCGMHSKATKVIAAGL

SEQ ID NO: 116297 - protein, 155 aa, Gossypium hirsutum
  unsure (1)..(155): unsure at all Xaa locations
  Clone ID: uC-gsflmaxxa097f01b1.pep
PLLLWASFALPGGEAMQRRXLASKTAAEALEEATTAESLVRNLSVFSELSSNSKPGNPLPTIDRFLSIYDDVVKYTGIAETVAAGYRSCIEEHSKSSSLWVEAAVTTDLEIVSLLTPQNNESLSALQINLSQHALPKNQLKTSSMPQLQQNNNAA

SEQ ID NO: 116298 - protein, 123 aa, Gossypium hirsutum
  unsure (1)..(123): unsure at all Xaa locations
  Clone ID: uC-gsflmaxxa097f05b1.pep
MESREPFSFPEISTVRYGMNPADIDDGIPRLSRVLSNKSRSTKSKQAAVXKGRAGTAGFGKAVDVLDTLGSSMTNLNLGSGFTSGVTTKGNKISILSFEVANTIVKGANLMQSLSKENIRHLK

SEQ ID NO: 116299 - protein, 168 aa, Gossypium hirsutum
  Clone ID: uC-gsflmaxxa097h11b1.pep
AGIKSSSTTSGGKFDDVWGISGSPPRPKNKSPNNSPFDDLLGNLGGKEPEMKVKSERVKSEKDAPLFDDLLSGFGRSSSPTPARSTSDAGQSQNPPSNSSKTGSNLMEDPFVVLGSTSDPADASSGLFMDPSEVISKPNGSGKSGVESSSGSGGVFDDIDPFDGIEKY

SEQ ID NO: 116300 - protein, 130 aa, Gossypium hirsutum
  Clone ID: uC-gsflmaxxa098b02b1.pep
MAPPMKIVFGLLTFVTVGMIIGALFQLAFIRGLEDSYGDDFPTTKLHRRQSDGYLKLPRGMSHWHGDKEAEILRLGVVKLEIISWSPRIIVLHNFLSNEECDYLRAIARPRLQVSTVVDVKTGKGIKSNV

SEQ ID NO: 116301 - protein, 69 aa, Gossypium hirsutum
  Clone ID: uC-gsflmaxxa098b04b1.pep
IGLTFSTIGFCLYFLSISSSFQFNQLNPFVWTSVWLIFNPISLTNQSSHVPKTLIISSNLNEIQVQGPK

SEQ ID NO: 116302 - protein, 135 aa, Gossypium hirsutum
  Clone ID: uC-gsflmaxxa098b11b1.pep
MDNKPCKSQDVEVRNGPWTMEEDLILINYIATHGEGVWNNLAKAAGLKRTGKSCRLRWLNYLRPDVRRGNITPEEQLLIMELHAKWGNRWSKIAKHLPGRTDNEIKNYWRTRIQKHINKQAEMFSFNISTPELLD

SEQ ID NO: 116303 - protein, 93 aa, Gossypium hirsutum
  Clone ID: uC-gsflmaxxa098d07b1.pep
LGFRRKSQVISCTVDNFAATERGKTNFYKVLSLDSENVSLAEIKKAYRRMVLQYHPDVCSPSAREESTHRFLELQMAYETLSDPISRQTFDYE

SEQ ID NO: 116304 - protein, 129 aa, Gossypium hirsutum
  Clone ID: uC-gsflmaxxa098d11b1.pep
MSAYKRVVQLGFDAYSSSLVNKFGSRQISQLVNSNGKRAFLVDTLALVRSLEAEGVPSKQAEAITAAITEVLNDSLENVSHSFVSKAEMQKTEMLQEANLSKFKSEVKSSQDYHFSMLQRETEKLRGDI

SEQ ID NO: 116305 - protein, 174 aa, Gossypium hirsutum
  Clone ID: uC-gsflmaxxa098g12b1.pep
FSRPPTRPPGRENGEQYGAPFKEEAWDDEEYSSNPLDTITPVKPPNEVIPVDNVKANVQSESPLNDIEEFMRQFADEPVPPQPQAYHSHVLHQVVSAEETQSTLLDPSPRGVLFPEQLTVLHGQARFEFSESPISQLLLQEAPEVTTVADHLGQVPQLCEEDFLEIDDLLGPEP

SEQ ID NO: 116306 - protein, 150 aa, Gossypium hirsutum
  Clone ID: uC-gsflmaxxa098h12b1.pep
MSKKKNPMVFFDVSIGGDLVERIIIELFADVVPKTAENFRALCTGEKGIGKSTGKPLHYKGTFFHRIIKGFMAQGGDFSKGNGTGGESIYGGKFADENFKLTHDGPGVLSMANSGPNTNGSQFFITFKRQPHLDGKHVVFGKGIKGVEVL

SEQ ID NO: 116307 - protein, 48 aa, Gossypium hirsutum
  Clone ID: uC-gsflmaxxa106a10b1.pep
KYHHLHSTAMLIRSLIEFTASTDGEAALGLYRSLSRLLLNFCNFPEGK

SEQ ID NO: 116308 - protein, 73 aa, Gossypium hirsutum
  Clone ID: uC-gsflmaxxa106c02b1.pep
RKKTGKGGDKRMEEKDEGLAMANDFFWSYTDEPHASRRRQILSKYPQIKELFGPDPFAFLKIGVVVSIQLWTV

SEQ ID NO: 116309 - protein, 47 aa, Gossypium hirsutum
  Clone ID: uC-gsflmaxxa106f03b1.pep
ILQVTLIFKVLKLGLRLGGLSTLSLESKFMVLLLILLRRRRSFYIGL

SEQ ID NO: 116310 - protein, 84 aa, Gossypium hirsutum
  Clone ID: uC-gsflmaxxa107a12b1.pep
GRLWGILAHSLCNFSAWGRRAFSEVFYEEAYNFYLVTNYLMFQHGSTWALTNVVYFLRSSSSITSKVYTVPKLVESSQRKFVMC

SEQ ID NO: 116311 - protein, 118 aa, Gossypium hirsutum
  unsure (1)..(118): unsure at all Xaa locations
  Clone ID: uC-gsflmaxxa107b12b1.pep
MSWRTYVDDHLMCEIENGHHLSSGAILGLDGSVWAQSSAFPTFKPEEITAIMKDFDEPGSLAPTGLHLGGAKYMVIQGEPGAVVRGKKGTGGVTVKKTGQALIXGIYDEPXTSGQRNM

SEQ ID NO: 116312 - protein, 164 aa, Gossypium hirsutum
  unsure (1)..(164): unsure at all Xaa locations
  Clone ID: uC-gsflmaxxa107c08b1.pep
RKKQDSEVSKENAVPVPNIDVVAEKGSTPISLSAPAVNTGGRDAMPLRTLVVPGSSSALDLIKKKLHDPGVPSSSPVPVMPVTATHELNGSRAVDVKGLYSESNKDKLKDANGDGSIFDSFSDFEDADSGPFKEERFMQFKEMLKVLGVAPFXKWEKELPKIGF

SEQ ID NO: 116313 - protein, 91 aa, Gossypium hirsutum
  Clone ID: uC-gsflmaxxa107c11b1.pep
MEKNSSCCFSNLSSNLPITCLITFITIFLHRVLNVIYRTGKPLGKRVSPQRPLSTLIVLGSGGHTAQMINLLLVSGKERFTPEVYIRAATD

SEQ ID NO: 116314 - protein, 41 aa, Gossypium hirsutum
  Clone ID: uC-gsflmaxxa119c02b1.pep
IGAPEQIITLCNCIADVRNKVHAVIDKFAERGLRSLAVARQ

SEQ ID NO: 116315 - protein, 83 aa, Gossypium hirsutum
  Clone ID: uC-gsflnu33B008f08b1.pep
FILSPCLRSKGPLTIRSPTIDGGRRCVKCGFSAPFQMGLKTKPSKPAKTKRKRPTFTPFFVFDSDRGEKPPMTGPHGDDAVVR

SEQ ID NO: 116316 - protein, 79 aa, Gossypium hirsutum
  Clone ID: uC-gsflnu33B011c05b1.pep
PTRPEKLKKRKRKRKSLLFILFFSLFLSCFLVLLDFDSANSFPLIVVKDSSDLCKFYGFFWVFAFFFFSFLNCNVIIVL

SEQ ID NO: 116317 - protein, 127 aa, Gossypium hirsutum
  unsure (1)..(127): unsure at all Xaa locations
  Clone ID: uC-gsflnu33B012f04b1.pep
PKVSAMWHAGAKMGLTVCRTSAFNDGGYNALQMCPGQFDERVFKALDYAIAETRQQGIRLLLTLVNNXHPYGGKTQYDNWAWQDGVGLSSPNDSFFVDPCIRKYVKNYVLTVLTXRNTITGIKYRND

SEQ ID NO: 116318 - protein, 78 aa, Gossypium hirsutum
  Clone ID: uC-gsflnu33B016f05b1.pep
KHCSVNPNLLAMAFFSTSFFTCFFSGSNKLASQGEDTQPSSSTIIKAGSDAKLKEGKAKNNPPIPYRIKTFPVMKAVG

SEQ ID NO: 116319 - protein, 108 aa, Gossypium hirsutum
  Clone ID: uC-gsflnu33B018d06b1.pep
PRVRGSAPARLPLPLDLAEDGPVYVNAKQYHGILRRRRYRAKLEAQNKLVKSRTPYLHESRHLHAVNRARGSGGRFLSKKKLQQPHDSTSNPSSHSISDASCLDRKNR

SEQ ID NO: 116320 - protein, 110 aa, Gossypium hirsutum
  Clone ID: uC-gsflnu33B019h06b1.pep
FYFFLSSSVVSVERVEQYMHIPSEAPEVIETNRPTHGWPCLGKVEICNLKVRYWPNAPLVLHGISCIFEGGSKIGIVGRTGSGKTTFISALFRLVEPYHAPITSLVFLQT

SEQ ID NO: 116321 - protein, 179 aa, Gossypium hirsutum
  unsure (1)..(179): unsure at all Xaa locations
  Clone ID: uC-gsflnu33B026a10b1.pep
FCVRYKSIEFDLLESQILSGDWDDCIDTLNKIKDVKDDTRSSVLFLVFKQRFLEYLNRGDDSLALSVLQKRVPTLHMSNETVHKLAYSILALKEMELGKLDEDVISELRKRLVMELGKQLPPPIVLPERRLEHLVETSVTAQIDSCIYHNSQDAVLLYEDHCCGRDQIPTDTXQILTEH

SEQ ID NO: 116322 - protein, 181 aa, Gossypium hirsutum
  Clone ID: uC-gsflnu33B026b10b1.pep
FRVGGYASDKAAQLFGMRGRLWVLWILQTFGGAFCIWLGRANTLPIAILAMILFSIGAQAACGATFGIIPFVSRRSLGIISGLTGAGGNFGSGLTQLIFFSTSRFSTAAGLTWMGVMIVACTLPVSLVHFPQWGSMFLPPSIDVARSTEEHYYSSEWNEDEKKKGMHSASLEFAENSLSER

SEQ ID NO: 116323 - protein, 164 aa, Gossypium hirsutum
  Clone ID: uC-gsflnu33B026e10b1.pep
SQLYTAAEYFELSYTNDDQKQIVVETLKDYTIKALVNTIDHLGSVTYKVNDLLDEKVEEVSGTELRVSCIEQRLRTCHEYIDHEGISQQSSVINTPKYNKRYILPVGETMHGANLTMSKYVGCSLDDEDDWHQFKNAVRATIRETPTCSVRETPTSSASFRKGR

SEQ ID NO: 116324 - protein, 51 aa, Gossypium hirsutum
  Clone ID: uC-gsflnu33B026f08b1.pep
SSCTWKVSFSWPIYLMVCFSYLGSCRTKLVRLVIGLYINYSAIIFHWQKDI

SEQ ID NO: 116325 - protein, 80 aa, Gossypium hirsutum
  unsure (1)..(80): unsure at all Xaa locations
  Clone ID: uC-gsflnu33B026g11b1.pep
MNKICIMHMLETSKKKKKEIKVYIKYELKKKKKKKKKKKKTKPPPTKKKQKXKKKTXPPPKNKYTTKKKKKQNPNHRGGA

SEQ ID NO: 116326 - protein, 57 aa, Gossypium hirsutum
  Clone ID: uC-gsflnu33B028a09b1.pep
HRYAHASAHASFRNTVSVCLLSFRDFSIDTPAKLFSCSFTSTYRYISCCPKIHLLRV

SEQ ID NO: 116327 - protein, 169 aa, Gossypium hirsutum
  Clone ID: uC-gsflnu33B028g12b1.pep
YSYFGIITIIIFLIIIIYRILYDLKKYGEYKYILKDDKKAKDYYFYSFIGCIIYGHGNLLNVNQLIVTIISLLSDSLFLGICEKFIAVLSCHYDDNNNNNDKCWHHEHFEYVCCNLILLSFYIPLCIMIAPMFNDTSSNDEKNKKNEIKEKKENNFCSFDNTIEFINPY

SEQ ID NO: 116328 - protein, 166 aa, Gossypium hirsutum
  Clone ID: uC-gsflnu33B028h11b1.pep
RVCLYSPRHKYRRVTSNTVSNIPALPAFSGSDSSPLSNAQGFHTVNETQEQTPSKHHIPTMSHQPQFHPIHQNHHQPVHPNQHGAHFPQNHQCGPPSHLPEISHAHQSPTMSQHIACLQPLTGGHVGARLHVMPTNPAKYCDECGAPYLRETSKFCSECGIKRLGI

SEQ ID NO: 116329 - protein, 109 aa, Gossypium hirsutum
  Clone ID: uC-gsflnu33B036a03b1.pep
IFACRCDGCSCKNTWGSYECKCKGNLLYIKEQDACIERNGSRFGWFLTLLVLAAVVAAGLAGYIFYKYRLRSYMDSEIMAIMSQYMPLDNQHNNEVASEAQPLRQSSTA

SEQ ID NO: 116330 - protein, 119 aa, Gossypium hirsutum
  unsure (1)..(119): unsure at all Xaa locations
  Clone ID: uC-gsflnu33B036h04b1.pep
MCPPTRPKNDIAAAITRTDIFDFLVDIVPRDEIKDETGLTPMVGATASGVPYFYPPMGQPAAGGPGGMMIGRPAVDPTGGIYGQPPSQAWQSVWQTAVNDDGSXGSGVTGGQENLDGQG

SEQ ID NO: 116331 - protein, 155 aa, Gossypium hirsutum
  Clone ID: uC-gsflnu33B037a08b1.pep
FLVGELCNSDANNFVNTKEASARYEKTEQWCTSWWYQFKVLLQRGVRERRYEAFNRLRIFQVISVAVLGGLLWWHTPASHIFDRIALLFFFSVFWGFYPLYNAVFTFPQERTMLIKERSFGMYRLSSYFLARTFRDLPLELALPSAFVFIIYWMG

SEQ ID NO: 116332 - protein, 155 aa, Gossypium hirsutum
  Clone ID: uC-gsflnu33B037d06b1.pep
CFRVTEKEAIPGDLLKWGSLGFCRTSRFASGFKPLEPKPLDSIMDLNRSKNRSPEDLASIWDDYHLGRGHIGLTMKAKLYRLLEQRGSDCRYFVVPLWRGSGYTTVFGQVQLPYMLFTGLEDYKARGTQACPYFTASFYTEFAESKDLVLIRGDI

SEQ ID NO: 116333 - protein, 131 aa, Gossypium hirsutum
  unsure (1)..(131): unsure at all Xaa locations
  Clone ID: uC-gsflnu33B037f09b1.pep
MRPRAVPCSVPFHVPARTSNPVIKHANDIFMLKHNHVPGKKSSTFQMRSLSNNTVFEDQSQGVICYRDENGEIVCEGYDEGPRFPRRXPGKSYHLRDAEILDLIRHRWLQIVNGDGLGTAIKGVIIVNNDS

SEQ ID NO: 116334 - protein, 46 aa, Gossypium hirsutum
  Clone ID: uC-gsflnu33B050b07b1.pep
SPKYSFNWYFNWILGWLGVAFSLAFSIGGICSIVNNELKMKFFKPN

SEQ ID NO: 116335 - protein, 147 aa, Gossypium hirsutum
  Clone ID: uC-gsflnu33B057f08b1.pep
YPLVDALLMPLKSLSPINAMNLDPNGCCLCLSLTSAKKSLLPCLECLFSTSIHSPNSGSFSLLLEPMESPSDLPSFDTSTSVDSLPLATVEFGSVSTIEHIRLMWPYLPQVKQTVGRAFDSTHWMALPTNTYEIKAFPGLYKQPSER

SEQ ID NO: 116336 - protein, 144 aa, Gossypium hirsutum
  Clone ID: uC-gsflnu33B059d10b1.pep
FIASEDEQARIEAAGGKIIQWNGPRVSGVLAMSRSIGDKYLKPWIIPDPEVTFVSRANDDECLVLASDGLWDVLSNDEACEVARKRIGLWRKKYRDKSNGEGIDGAAQSAAEYLSRLALSKGSKDNISVIVVDLKAHTKFKNKT

SEQ ID NO: 116337 - protein, 126 aa, Gossypium hirsutum
  unsure (1)..(126): unsure at all Xaa locations
  Clone ID: uC-gsflnu33B059e01b1.pep
MAPNTVAYTAVFVTLNLTLYTLVSTTYRPSXTTTKETHAYPQKYTXRPEQAGTRPRDALKLGLRADLWASVRVAVGPARTTCWTISWGLTDLEADVCLCTGIKANVKADDLNVNVKLAVLLNSCEK

SEQ ID NO: 116338 - protein, 80 aa, Gossypium hirsutum
  Clone ID: uC-gsflnu33B059e09b1.pep
SNSKTDRRLLCFSTSNGWVFLSSYFAASLSNPIGQFLLFSLLLLLASSSTITMMSKFIINKKLLVELNLWILYCGNRDND

SEQ ID NO: 116339 - protein, 63 aa, Gossypium hirsutum
  Clone ID: uC-gsflnu33B060d02b1.pep
AVITTGKATAKYQLLRNCFSLRREACPFRFRESRLLIRLAKLNHVHFHLQPLLDMERQRGRCL

SEQ ID NO: 116340 - protein, 40 aa, Gossypium hirsutum
  Clone ID: uC-gsflnu33B068g05b1.pep
LDMYFTIALRDANNSLICALIPILMARHSTLFTDMNYMYE

SEQ ID NO: 116341 - protein, 44 aa, Gossypium hirsutum
  Clone ID: uC-gsflnu33B070a08b1.pep
LQRFARTHFPSVKYMEYAVQVETYTLSKANNLVLNVDGAIGSLF

SEQ ID NO: 116342 - protein, 61 aa, Gossypium hirsutum
  Clone ID: uC-gsflnu33B070g07b1.pep
KYIRKLERNRKSLKNRAYLRKTNINSYLNKYGHCYKYVDGEVSVEEIFPFFHMFLLMNLSL

SEQ ID NO: 116343 - protein, 153 aa, Gossypium hirsutum
  Clone ID: uC-gsflnu33B072a01b1.pep
VLKPWMELGYVSLQDIREQERFDGYYHNQFLVVNDCLHRYKFMAKWIFFFDVDEYIFVPPKTTLGSVLDSLSDYSQITIEQMPMSNKLCHSVDAAKRHRRWGFEKLVYRDVKRGIRRDRKYAIQPRNVYATGVHMSQNLRAGAKTTHKTEGRI

SEQ ID NO: 116344 - protein, 59 aa, Gossypium hirsutum
  Clone ID: uC-gsflnu33B073c06b1.pep
FLHPLISKAIMRLVQKHSCKISVETFIRGFDPLNMLYDLCNASCGNINKKTKLVLVGIL

SEQ ID NO: 116345 - protein, 43 aa, Gossypium hirsutum
  Clone ID: uC-gsflnu33B074b08b1.pep
KMICSENSLAPHGCWVVLRRFRILFFLDLKVYVLSFFLRVHVT

SEQ ID NO: 116346 - protein, 65 aa, Gossypium hirsutum
  Clone ID: uC-gsflnu33B075a09b1.pep
KRAAFIRENHLFYLLSMQLPFSFFMLFLNLISISFFSIYYSSCKSFSFILILFDIPSIPLFSSFN

SEQ ID NO: 116347 - protein, 60 aa, Gossypium hirsutum
  Clone ID: uC-gsflnu33B078c02b1.pep
IASLPEVGVFFFFFFLETNAIVIITNKILTYYKFKPYSSFQNLLSLYNGHKLFHIASDKH

SEQ ID NO: 116348 - protein, 46 aa, Gossypium hirsutum
  Clone ID: uC-gsflnu33B080g03b1.pep
RKRGNETKWGRKSTLKAIFQLFISIPSLLPNLREFAHGYYHVSHLE

SEQ ID NO: 116349 - protein, 129 aa, Gossypium hirsutum
  Clone ID: uC-gsflnu33B081c10b1.pep
MATGTPKKSGPPKIVTLNNALKLAEQWINKMNGSAEYEVVEAEPEARPERLGLGAKVPRQSKVGLSNDPVERKLSAKLGVGKRKVLKNQDSTIPSSKDRVDEDDGDEDLDSRSSAFSKKRAVPLTSQYR

SEQ ID NO: 116350 - protein, 124 aa, Gossypium hirsutum
  unsure (1)..(124): unsure at all Xaa locations
  Clone ID: uC-gsflnu33B082a05b1.pep
GVTFGIKPDLDTYTILIDNVCTSKNLREAMRLGGVLNDSRVKPDCVGYNTIMKGYCMLSKGSEAIEVYXKMKEEGLEPDLVTYNTLIFGLSKSGRVKEGXKYLNILVESGHFPDAGTYTSLMNG

SEQ ID NO: 116351 - protein, 68 aa, Gossypium hirsutum
  Clone ID: uC-gsflnu33B082d08b1.pep
LPICTNLVWLINVRPFPPLIHYKVLQTIKDIVNRSLLESKNWVYNCLNFNRVITVHLRRETKPDRTQA

SEQ ID NO: 116352 - protein, 178 aa, Gossypium hirsutum
  Clone ID: uC-gsflnu33B082f11b1.pep
SRVRPRVRPRGRPRVREEFRYDSSVSAEVGGRQTPSLQFPRTKEVMVNGVHVRVKYCDTCMLYRPPRCSHCSICNNCVERFDHHCPWVGQCIGLRNYRYFFMFVSSATLLCIYVFSMSALYIKVLMDDHQGTVWKAMKESPPSVILMAYCFISLWLVGGLTGFHLYLISTNQTTYENS

SEQ ID NO: 116353 - protein, 166 aa, Gossypium hirsutum
  unsure (1)..(166): unsure at all Xaa locations
  Clone ID: uC-gsflnu33B082g10b1.pep
QNIVEEFHLPPLLYLEAVVKETLRIHPPAPLLMPHMLSETTVVAGYTIXKNSNIFFNVWAIQRDAEFLENPLQFEPERFLNVIEKRNYKGNSFDFFPFGSGRRICVGISMAEKIIMLMLATLHCFEWKLPNRREPDVKEQLHLLLQRXEPLVVVPISRSSKWGYCG

SEQ ID NO: 116354 - protein, 76 aa, Gossypium hirsutum
  Clone ID: uC-gsflnu33B083d11b1.pep
TFLLVPLFQHVAEMDNAIMPQLQSLDLQSCGKLKALPHYLVGLTSLKEQSPDWGPGLAEYCQIERSNISRIPNIKI

SEQ ID NO: 116355 - protein, 113 aa, Gossypium hirsutum
  Clone ID: uC-gsflnu33B083e12b1.pep
MASFNYMFLSFVLALSFASFDVGFGARHLLQLPQLPPMPMIPTLPMPTIPTLPTTQPSLPRPGAMPPLPAMPNMPTLPNVPRATLPPLPSFPSIPTTIPSIPFLSPPPAPSTP

SEQ ID NO: 116356 - protein, 130 aa, Gossypium hirsutum
  unsure (1)..(130): unsure at all Xaa locations
  Clone ID: uC-gsflnu33B083f08b1.pep
MAGPVRTEYGGPQPRKTLYFPREPKDPSMPDQAHISLAGENHMRISWITDDNSVPXIDEYGSLPGQYTFLSXGEATSYNYXYIASXKIHHTVIGPLEHDTAYFYRCGRQGPEFQLKTPPGQFTATCAVAG

SEQ ID NO: 116357 - protein, 176 aa, Gossypium hirsutum
  Clone ID: uC-gsflnu33B084b09b1.pep
MFCAISGKVPEHPVVSVKSGNVYEKRLIEQWLESNDNVEPTTKQQISKDDLVEVKGSKTVIPRPTTATSIPSMLQLLQNEWDAVMLESFSLKQQLENVRQELAHALYQHDAACRVIARLIKERDEARALSANIRAQLPAEQTSSDSMEVEAGLPEEVKFKIQAFSQDLAKERKKRQ

SEQ ID NO: 116358 - protein, 103 aa, Gossypium hirsutum
  Clone ID: uC-gsflnu33B084b11b1.pep
PTSSQMPEFQVIFNDQFTNDFNTLFTYLPQDKQYLVASDPGSFHNQVLPKSSLHLAHCSNSLHWFSRLPKELRDERFPAWNKGTIYYTSASPEVTMAYATHFA

SEQ ID NO: 116359 - protein, 88 aa, Gossypium hirsutum
  Clone ID: uC-gsflnu33B084d03b1.pep
FNEGITPGHSRVFGSFESSDYSSAQYKEDMKKFRKIALESQELPSSEYSVVTSDYGVNPSSSSTEGQQSTQIETSKGEKETKDVSGSS

SEQ ID NO: 116360 - protein, 140 aa, Gossypium hirsutum
  unsure (1)..(140): unsure at all Xaa locations
  Clone ID: uC-gsflnu33B084d09b1.pep
LLAEPSCYICLPVANLPKLISYFYLLGLLCVERHGGDLSSERQSVNTEETVVTNKDEQTCLGRTEHESRFIHKTQGYGLHGHETGXLPPRTTRTKETYEPYGTPAXYHPDGPCIRIPWCRTNCKDSYFCRMHNAYWNAEQ

SEQ ID NO: 116361 - protein, 98 aa, Gossypium hirsutum
  Clone ID: uC-gsflnu33B084g08b1.pep
GFLAVVHDTHQNGQTRRNGGKQQCERSQKPGLRNGFVVSAFEGGTVRIGERQLLVVTDFRRFVGHATEQRAHTGRGAQTTTNRGDERGHLNLSSLQTK

SEQ ID NO: 116362 - protein, 56 aa, Gossypium hirsutum
  Clone ID: uC-gsflnu33B088a03b1.pep
FIGSVSSKIGGRNQLTDAEPVALIGNDDAPLVQEDVPVEKQSRRKRPRLRSSRGGR

SEQ ID NO: 116363 - protein, 92 aa, Gossypium hirsutum
  Clone ID: uC-gsflnu33B092a11b1.pep
QMMFIFQVMFTFLMMFTSMGTVKKEKTLRKIHKVMHMHSDSMSQATSSLTLVMDPYGIPQAVNVLDSMSNEDPEASLLYFFALKLLLNKDMR

SEQ ID NO: 116364 - protein, 127 aa, Gossypium hirsutum
  Clone ID: uC-gsflnu33B093c12b1.pep
FRFQHLRKDGSEKLSSEAAKQVYDEACKMVKDSMPTPESSFTPQDNIALENKVYTQVFGSEKDGKMLGYGRGMTKSKLFGYGSVTRGSQSTSAISTLIEKMSAKHVEQIQTIQAEQAIREKTLLEEA

SEQ ID NO: 116365 - protein, 181 aa, Gossypium hirsutum
  unsure (1)..(181): unsure at all Xaa locations
  Clone ID: uC-gsflnu33B093e01b1.pep
LYFNNDEDDGFDQAICPVDSQEAGMIVDNDLNTLIVRPLTPGVTLHAIVDACHSGTILDLPKVYMSEEKNWVNNSPPSGAEKRTSGGLAISISACLDHQAAADSSAFTPGEMNGALTYILAEILKKLPGPTYGDLFDLINETLNNVNQSSCLANTXFLRRLFNSNFSQTPLLSSSAGVDVY

SEQ ID NO: 116366 - protein, 171 aa, Gossypium hirsutum
  Clone ID: uC-gsflnu33B093e10b1.pep
HRVRPRVRVDTGNRPVTGIRLYLEGRKNDHLAIHLQHLSTLPTILQLSDDHNYEPNDEPLGRGYFEPVKWSIFSHVYTAPIQYNGSHFDDTAAIVTKGGFEVKSVGMRKVLFLRLGFSMVSFTKIRRSEWDGPSTLSRKSGVFSMLISTRFSSGLTQPEKPTKVDLNSAVF

SEQ ID NO: 116367 - protein, 119 aa, Gossypium hirsutum
  unsure (1)..(119): unsure at all Xaa locations
  Clone ID: uC-gsflnu33B093g02b1.pep
MAQPTGRGRVVGDYLVGRQIGSGSFSIVWHARHRVHGTEVAIKEIVTSRLNXKLQDSLMSEIFILKRINHPNIIRLHDILEAPGQIHLVLEYCKGVDLSMYVTRLESVPEATAKHFMQQ

SEQ ID NO: 116368 - protein, 69 aa, Gossypium hirsutum
  Clone ID: uC-gsflnu33B094a05b1.pep
QHMSDGKYSETVGSDLAPPLARVVSTSVPTNKPKLVMSQTGLQAPNTHTMRKQEASTQEPYQAKLVTDS

SEQ ID NO: 116369 - protein, 61 aa, Gossypium hirsutum
  unsure (1)..(61): unsure at all Xaa locations
  Clone ID: uC-gsflnu33B094b11b1.pep
PHKPRLDQIRGRVFXHRSVVLPYAAYARKLKLENSKLVRDIAELSGKYSDLINKPYYRASV

SEQ ID NO: 116370 - protein, 72 aa, Gossypium hirsutum
  Clone ID: uC-gsflnu33B094h11b1.pep
SSSFRVLFLFLGLNFFSQILKILGSSFSILDSISRRRYRSGLLTEMQRAADLGKLGEKIKGIGVAGKWYGPP

SEQ ID NO: 116371 - protein, 63 aa, Gossypium hirsutum
  Clone ID: uC-gsflnu33B098b08b1.pep
TLLLNHPEAMHKAWTEITAEVGHDKFLDETDLPKLNYLQSIISETMRLFSPAPLLLPHELSDD

SEQ ID NO: 116372 - protein, 89 aa, Gossypium hirsutum
  Clone ID: uC-gsflnu33B098d11b1.pep
LIFTLVILFAWLILADGIRFTEEGRLSKLDKDEYYSGELVTKTLIGSRNKIKDSRGTHGADAAAVTTIFASNTKDLHATTPGHSPGTGH

SEQ ID NO: 116373 - protein, 75 aa, Gossypium hirsutum
  Clone ID: uC-gsflnu33B100d03b1.pep
MAKLLATLFILTLFVSTLSFAARTAPPFPANTQQQQAQGVVEVEDSCEGVAEEECLMRRTLAAHTDYIYTQNHNP

SEQ ID NO: 116374 - protein, 160 aa, Gossypium hirsutum
  unsure (1)..(160): unsure at all Xaa locations
  Clone ID: uC-gsflnu33B100e09b1.pep
SLEGYAAGNAIPSPLKNVERGFLKKYWAKWKASHTGRCRAMPHIKTYTRYKGQNLAWFLLTSANLSKAAWGTLQKNNSQLMIRSYELGVLFLPSRIKVDGPSREFSCTDKAGSSKGTGKSKSSGNPIPAMTKLVTLAWQGSKTSEVIXMPVPYELPPEPY

SEQ ID NO: 116375 - protein, 100 aa, Gossypium hirsutum
  Clone ID: uC-gsflnu33B100f12b1.pep
IFLYPLGSVDKVVDVTRWKPPSREWVKINFDAAFDRALFNQGQGLLPEMEEEGWFPLDQLYTRMLARLLQRRPSPSFGAAEELCPEVCCEDFSRRLDSRN

SEQ ID NO: 116376 - protein, 176 aa, Gossypium hirsutum
  Clone ID: uC-gsflnu33B101e02b1.pep
NNLVTPDQPKDNAVVNSGFEFGPWMFQNVSLGVLLPTNLDEETSPLPGWMVESTRAVRYIDSNHYAVPEGKRAVELVSGKEGIISQMVETKPDKLYSLTFSLGHAGDKCKEPLAAMAFAGDQAQNFHYTPDSNSTFQVASVNFTAKAERTRIAFYSVYYNTRTDDMSSLCGPVVDD

SEQ ID NO: 116377 - protein, 73 aa, Gossypium hirsutum
  Clone ID: uC-gsflnu33B113g03b1.pep
HMIISLMEMQETTHTVNIRFLEIGVQGSAYTSSSAIDCFLDLEHVNQSLFETHCLLRSNRVKEKAYLCLKSNS

SEQ ID NO: 116378 - protein, 139 aa, Gossypium hirsutum
  Clone ID: uC-gsflnu33B114a06b1.pep
ASSTYLVSDRPFIDWLSESDPTVSAFVPSQPSKPKLHVSSDNNNNSPALKSSSSARSRDQVVVLRVAIHCKGCEGKLRKHISKMEGVKSFSIDLPTKNVTVIGDVTPSSVLASVSRVKSAQLWPSAAPSQSSPMVKMNY

SEQ ID NO: 116379 - protein, 161 aa, Gossypium hirsutum
  Clone ID: uC-gsflnu33B115g09b1.pep
SFHASAHASAETNVELPVLEARSVEDIDLAFKQLHEGVDVEEVILPSMIENLPDHTDTTSEFPVVEARSLDDIHNAFIKGPEPNPAELPHSADLRHGSSEVELHDVVSSNEVEVGQAVSGFEEHLENVAAGEPKKEYEKKEEKKEEKKEEKKEEKKDEKNK

SEQ ID NO: 116380 - protein, 172 aa, Gossypium hirsutum
  unsure (1)..(172): unsure at all Xaa locations
  Clone ID: uC-gsflnu33B126a12b1.pep
YFVKKLLVKDPHARLTAAQALSHPWVREGGNASDIPVDISVLNNLRQFVKYSRLKQFALRALASTLNEEEIADLRDQFDAIDVDKNGSISLEEMRQALAKDLAWKXKEPRVLEILQAIDSNTDGLVEFKEFVAAALHVNQMGEHDSDKWQMLSQAAFEKFDVNRDGFITPEE

SEQ ID NO: 116381 - protein, 110 aa, Gossypium hirsutum
  Clone ID: uC-gsflnu33B128b02b1.pep
STRPPTRPPTRPGKKNKNTMAITSHLPNLINVPLDRPASFSHLPCNEFLRIQSNRASTSTSFSLGINVSRKQCKPMLVRSMGSSFGSRLEESVKKTRARNPSGGYSKSWC

SEQ ID NO: 116382 - protein, 67 aa, Gossypium hirsutum
  Clone ID: uC-gsflnu33B128h07b1.pep
HKKINPVKLITFIIGKKEKKKKTIFSPFKNPPKQQKDLSFVYGKKLINLHKNGQPRYQELKSELGFL

SEQ ID NO: 116383 - protein, 67 aa, Gossypium hirsutum
  Clone ID: uC-gsflnu33B130c01b1.pep
ILQRIFQYATIGVIRFRSRCGNVDYNYRLLTWYWSYQTEYAVGWDCICIDLRGDCLTNKFKHKKLKT

SEQ ID NO: 116384 - protein, 156 aa, Gossypium hirsutum
  unsure (1)..(156): unsure at all Xaa locations
  Clone ID: uC-gsflnu33B131a01b1.pep
KKLESLPSMVAGVWSSNGSAQLEATTQFRKLLSIERSPPIDEVIQSGVVPRFVEFLMREDYPQLQFEAAWALTNIASGTSEHTKVVIDHGAVPIFVKLLGSPSDDVREQAVWALGNVAGDSPRCRDLGLSHGALMPLLAQLNEHXKLSMLRNATWT

SEQ ID NO: 116385 - protein, 149 aa, Gossypium hirsutum
  Clone ID: uC-gsflnu33B133a12b1.pep
LSLALSKTEEDAEHEIEENGGIQEAISWYNRVLSFQIEGGHGVKFTFNDINIKNPKEEYSFTIRHANDAYSLLDCNPNLNGIKDLINELNRTNDLFGFARTIREKFQEAAALGLQPQSTTFHQDCSTIFLSGPALSVSSNSSRIFCPEK

SEQ ID NO: 116386 - protein, 81 aa, Gossypium hirsutum
  Clone ID: uC-gsflnu33B134c10b1.pep
PSRPLAKNAEAIVSLNHVPDMLRHKLSRSVSNSRKMDAHFLQLLASGSPTEIRVNDCSRVTEDEFTKIFGCCDTRNLIGID

SEQ ID NO: 116387 - protein, 151 aa, Gossypium hirsutum
  Clone ID: uC-gsflnu33B136e06b1.pep
FENQDNDARENQDNMKLSHENISTVQGHADFQTILTSSLAEADHKIESNPEMLELENIINMEVMVENMRNNLAKARELKKLEEEIKKNKTNIRKDELKVEKGEADLKENKLKVEKGEAELKENQVKLEKDKAELEENLLKLKTMQKKPRLA

SEQ ID NO: 116388 - protein, 63 aa, Gossypium hirsutum
  Clone ID: uC-gsflnu33B137d12b1.pep
YHNLIKVNLWSFCELLGITQINPQKKLGQAAKQNFIAKDILKKNSQILWSLIVPIEAHFLFIM

SEQ ID NO: 116389 - protein, 55 aa, Gossypium hirsutum
  Clone ID: uC-gsflnu33B142e02b1.pep
GTAVSGENKWKILPLGNLEAVRKYREKVKARAASLEDEVVRLSSFNHHFVKSFLG

SEQ ID NO: 116390 - protein, 129 aa, Gossypium hirsutum
  unsure (1)..(129): unsure at all Xaa locations
  Clone ID: uC-gsflnu33B146a01b1.pep
VAVAAALSQLNVEKAVNALLKWRDSQSQAQKPQLLEQDEFLYLIVSLKKIPQKARVNPIKVPLPHPIIDDPAELCLFIDDRSKSGITKDAASKKIKSENIPINKVIKLSKLKTDYKPFEAXRKLWDSYD

SEQ ID NO: 116391 - protein, 33 aa, Gossypium hirsutum
  Clone ID: uC-gsflnu33B146c04b1.pep
NFSSYGLKMNRNKFSTRVSGLNCDNFESFGFKD

SEQ ID NO: 116392 - protein, 112 aa, Gossypium hirsutum
  Clone ID: uC-gsronu33B154a10b2.pep
PSRSATRSVPLGGDLGYTKRYVRCLQISEVVNSMKDLIDYSRETKTGPMESLAKFPRRTSTSFGIQAQQPEEQLLQQQLTPQQRTGAQNTSCQSSTQVSGMASGGNHGGANI

SEQ ID NO: 116393 - protein, 144 aa, Gossypium hirsutum
  unsure (1)..(144): unsure at all Xaa locations
  Clone ID: uC-gsronu33B156b08b1.pep
VVSVSGAVCSINNLSSDDHHRCNDLNLNSASFLLQNVLGKSSSTLYAIALLASGQSSTITGTYAGQFIMXGFLNLKMKKWVRNLMTRCIAITPSLIVSIIGGSQGAGRLIIIXASMILSFELPIALIPLLKFMCSLTKMGPYKN

SEQ ID NO: 116394 - protein, 68 aa, Gossypium hirsutum
  unsure (1)..(68): unsure at all Xaa locations
  Clone ID: uC-gsronu33B157a04b1.pep
PEXLSTGCKTSPVPLKDEIVEELSSQFSADHVENGHGCNKKESTIEQYNLFAASNGLWISYFLSFILC

SEQ ID NO: 116395 - protein, 111 aa, Gossypium hirsutum
  Clone ID: uC-gsronu33B158h07b2.pep
LIGSSSFVAELWEALLQILETQTTTKAMRYRSLLHHLKKNNISMSMYLAEIKHLCDSLGGCGHYVSLEEQKSELLNGLLLEFDHVVSIIAKSRVPFDLYDITTTFLDAEAR

SEQ ID NO: 116396 - protein, 44 aa, Gossypium hirsutum
  Clone ID: uC-gsronu33B159d05b1.pep
RDQLPIGIKCRGCMQFGMCIYLPLIEGNRHLLYTAYRQVFILVK

SEQ ID NO: 116397 - protein, 155 aa, Gossypium hirsutum
  unsure (1)..(155): unsure at all Xaa locations
  Clone ID: uC-gsronu33B160f07b1.pep
LSRIWTLFFILSSVFLLTGFETVTYMLQGAVKHEDFDGHRGTIGAGDLQWMTAGRGIVHSEMPAAQGTQKGLQLWINLSSKYKMIEPRYQEISSKDIAEATKDGIKVRVIAGEALGTKSAVYTRTPTMYLDFTLEPGAHLSQPIPESWNAXCYVL

SEQ ID NO: 116398 - protein, 88 aa, Gossypium hirsutum
  Clone ID: uC-gsronu33B167g03b1.pep
FIFLLFYIFFFYFFFFYFFFIFFLFFFGFFYFFYFFFLKEKSNIKSKGKMGATTGFVFTSKQIFTYFRLVFHQKINPYFNLVPIICKF

SEQ ID NO: 116399 - protein, 77 aa, Gossypium hirsutum
  Clone ID: uC-gsronu33B168c05b1.pep
MIKVTKLYVAKKNPRTKSTKKTAEPRFIFHYTIQNPALLTAATPNSIYAFRTTSGEKIHNNLPNRENWKLTVQNCSK

SEQ ID NO: 116400 - protein, 174 aa, Gossypium hirsutum
  Clone ID: uC-gsronu33B169h11b1.pep
YASAHASAHACDRCDDFEELVYLRWINACLRYELRNYQSPAGETVARDLSRSLSPKSEAKAKKLILEYAHTEGMGSIDFDCDQWSSSQASETQELDDPLIENSSATKPTNSGKNKFFKNLRRLIRRKDGHHADHASSMGRPDHVDDPPTWSSSTKSDSVTMVSSPSDRVTTSSK

SEQ ID NO: 116401 - protein, 157 aa, Gossypium hirsutum
  Clone ID: uC-gsflmaxxa010b12b1.pep
LSIHFLSPQTPLSLPLSPPPQHFHFFLVLDSKKGFIKALPSMVDIAKCLPFNGTAIKTEFKNLCSIVKTSTTLALFILSFEAHTLFLALGPSSPWFTTSSDSYRSQFPSLFGYLFPNTSSPSSSNHTLQPLPNDKNKGTQPFNNSEQLPSSNNTNMN

SEQ ID NO: 116402 - protein, 65 aa, Gossypium hirsutum
  Clone ID: uC-gsflmaxxa015d05b1.pep
IFCFVHTHIHIFNRFYLVCCRQISIICCFYVSYFIIFPFLFFTFFCLGFIFCPFYLLYTSRIYIY

SEQ ID NO: 116403 - protein, 58 aa, Gossypium hirsutum
  Clone ID: uC-gsflmaxxa028f09b1.pep
KPMIVFAKRTYERKRTHREERKSNSFSKGDFKFYFLYSDLFSFYWLGFLACESTPMRA

SEQ ID NO: 116404 - protein, 156 aa, Gossypium hirsutum
  Clone ID: uC-gsflmaxxa041g02b1.pep
LTRPGWLGRGRLARMSLMGIPMDRSLLVCLISVYVCFITRECMNKVASFLMSIIYQCTCTLTYNGIRCTCPHIFSVLCLFKFYEILQLLNDTAPSPIEIAKAYMANRTSESNLSSKSIISKDERPTMLANDFASKPFVPFASPKAFTCWPGSMVHD

SEQ ID NO: 116405 - protein, 99 aa, Gossypium hirsutum
  unsure (1)..(99): unsure at all Xaa locations
  Clone ID: uC-gsflmaxxa061b07b1.pep
FEQHYDRLLESYYSLEKKYIKAIPDSXVALAKWRNLNRLHDRNETLYYRVLIDNIKDCVXIMDTPTVELVLKNYSGLFRRPHDLHASATDNVEMILYDI

SEQ ID NO: 116406 - protein, 70 aa, Gossypium hirsutum
  Clone ID: uC-gsflmaxxa076g11b1.pep
LLIEVTKSTWFQILTLELLIAFLSCCFRFPIGRRLFSHTFFFHPYSFPCILSCPSTIYYFFPTDVSLVFE

SEQ ID NO: 116407 - protein, 161 aa, Gossypium hirsutum
  Clone ID: uC-gsflmaxxa091g05b1.pep
MSSVVELTASQESHDEGKNERLDNFLNMDPTLSNSLSLSADTFLKAAMTLKNQVVEVTWKGRGSGGGGGGGLGTGIDPTVYTGLLGTAFTCLRSYEATGNRQDLVLSAEIVDTCLSVARASPRHVTFLCGRGGVYSLGAVVANYMGDHQRLEFFLNLFIEV

SEQ ID NO: 116408 - protein, 40 aa, Gossypium hirsutum
  Clone ID: uC-gsflmaxxa095b01b1.pep
DSEMLRFNQVLEISDGTVDGVAASKEEFGYPSPNAASGTA

SEQ ID NO: 116409 - protein, 118 aa, Gossypium hirsutum
  unsure (1)..(118): unsure at all Xaa locations
  Clone ID: uC-gsflmaxxa119e11b1.pep
KKGKNKEMKREEEEKKEKKIKKERRRRKREIKXKERDKNICKXKDIKKDKKKKKKEYKXKRKKKKKKKKKEKEKNIKKRKKKKRKKKKGRKNRENKKKRSNKKTNSMVCERRANHSSI

SEQ ID NO: 116410 - protein, 122 aa, Gossypium hirsutum
  Clone ID: uC-gsronu33B016d09b1.pep
MKESGGRKQGAASPCAACKLLRRRCAHDCVFAPYFPADEPHKFANVHKVFGASNVNKMLQELPVHQRGDAVSSMVYEANARVRDPVYGCVGAISSLQQQIDTLQTQLALAQAEVVHLRVKQT

SEQ ID NO: 116411 - protein, 59 aa, Gossypium hirsutum
  Clone ID: uC-gsronu33B047d08b1.pep
LIVKEVVRILPFVFPLRAIKSCALGFLIICLIVSSPIYPGPASKRSACSFCHVFSRLIL

SEQ ID NO: 116412 - protein, 111 aa, Gossypium hirsutum
  unsure (1)..(111): unsure at all Xaa locations
  Clone ID: uC-gsronu33B082a11b1.pep
IIKAQVQVIREKADRPFRCLDCQYRRELVRVYLANVEQICRRFLDDRRSNLGKFIEDKAKWSSFWTFWSGIDQNSRRPMSREKKDMTLTAAVLHFSIEKEVPSXLDMDSLY

SEQ ID NO: 116413 - protein, 161 aa, Gossypium hirsutum
  Clone ID: uC-gsronu33B146e06b1.pep
IIYVNRACGSDGGTALHCAVAGGADSSVEIVKLLLDASADVNCVDANGNKPVDLIVPGLKSSSNYRRKVIELLLNGDDVLYGEEESDKTTMPQLPKEGSEKREYPMDVSLPDINNRIYGTDDFRMYTFKVKPCSRAYSHDWTECPSVHSGENARRKDPRST

SEQ ID NO: 116414 - protein, 58 aa, Gossypium hirsutum
  Clone ID: uC-gsronu33B147h11b1.pep
PSRPITVGSLILRDTPNFMIERGQTEEAKAKLKRIRGVDDVHEESRDLVAHSDATDLD

SEQ ID NO: 116415 - protein, 162 aa, Gossypium hirsutum
  Clone ID: uC-gsronu33B163f04b2.pep
LVVFHSGIEVYGAEYGFGAHEYPTTGVFEVEPRSCPGFIFRRSVLLGSTDMSRSEFRLFMEELSQKYRGDTYHLVARNCNHFTDDVCMQLTGKHIPGWVNRLARLGSFCNCLLPESIQIPAVWHVPDRPAFSDDERSNSAGTFLTGESEEEEADHHLLTHPI

SEQ ID NO: 116416 - protein, 161 aa, Gossypium hirsutum
  Clone ID: uC-gsronu33B168h10b1.pep
FVVSLTTFFYLGGLCFGYAAFGNNTPGNLLTGFGFYEPYWLVDLANACIVLHLVGGYQIFGQPVFAFAERWFINRFPNSWFVNNYYTNKHRWFPSFQINPLKICFRTAYVATTTAIAMMFPYFNQVLGVLGALNFWPLAIYFSVEMCIVQKKIQSWTRKWV

SEQ ID NO: 116417 - protein, 136 aa, Gossypium hirsutum
  Clone ID: uC-gsronu33B169a06b1.pep
LLFLEDPHEIRRICIMGRNCTLKRGTDDVECSLPLEKLIAEEEEEEIEMLLENYLQRCESCHGQAERLLDSAKEMEDSISVNLSSRRLEVSKVELLLQVGTFCVAVGALVASIFGMNLKSYLEYHMFAFWVTTAGI

SEQ ID NO: 116418 - protein, 129 aa, Gossypium hirsutum
  Clone ID: uC-gsflnu33B003a02b1.pep
SLIFIVFDAIALFISLAVVVVQTSIVVIHRKAKKQMMAVINKLMWLACVLITVAFLALSYIVVGDEWWLANLVTGIGTVIIASTLGTLCHWVIVNRIEALKLRSIRRSSMNSGSRSFSMSYVSDTEILN

SEQ ID NO: 116419 - protein, 99 aa, Gossypium hirsutum
  Clone ID: uC-gsflnu33B004c08b1.pep
EYKVIQIVFRRKLRRVDSSTTSTTSSESEVQILTIGSPSWRDLGTIPYRFIHSKTKALVNGRLHWLSKPNRYTTASLLVSFDLETEQFQEVPKPDCCGS

SEQ ID NO: 116420 - protein, 55 aa, Gossypium hirsutum
  Clone ID: uC-gsflnu33B013f04b1.pep
ICRLNMNIMQSVFQGCFHCLYTYTHSYLTHILCLLPEFLLNQLSEACILKCNITS

SEQ ID NO: 116421 - protein, 107 aa, Gossypium hirsutum
  Clone ID: uC-gsflnu33B058d09b1.pep
SKRDRNGRLKKNSQKSTGVETVKEKTTGKRSGLFSSFRAIFRSSGKASESDALPVAQWPPGNRDIRSRLPPDDRDAISMEPEIMESEPVSLGGMKRFASGRRSEPLI

SEQ ID NO: 116422 - protein, 109 aa, Gossypium hirsutum
  unsure (1)..(109): unsure at all Xaa locations
  Clone ID: uC-gsflnu33B063g02b1.pep
MKITSFVLLKCTPDGSDPIILANATDLSHFGYFHRSSVTEFIVFFLGTVAKRTPSGELLSGHHEXYKVHAYNRYGPCALVFMDDHHPARSAFSLLNQILDEYQKNPGES

SEQ ID NO: 116423 - protein, 124 aa, Gossypium hirsutum
  unsure (1)..(124): unsure at all Xaa locations
  Clone ID: uC-gsflnu33B084c02b1.pep
FYAYVENARELAAKLLNQCLLDNNDNQYLWMLVEHALELPLHWRIPRFEAGWFIDVYEKNKEKNSILLELAILDYNILQSIHQDDLRYVFAWRKEHGFDKRMSFAXRDRLMENFLWSVGMIISP

SEQ ID NO: 116424 - protein, 89 aa, Gossypium hirsutum
  Clone ID: uC-gsflnu33B130c10b1.pep
IDHILHIHHYPHGQIEHKKTELRLITLDDHYPHIHHSYITEEDYLPYIIYIKMDFTTHGSNNKLTRNSSTNLHSKSFAFIVGTLVSFLS

SEQ ID NO: 116425 - protein, 161 aa, Gossypium hirsutum
  unsure (1)..(161): unsure at all Xaa locations
  Clone ID: AW561931.1.pep
GNFRSWWSCNIFGSGIIFMAIILATNTXFPKLFTDKQLVIKAASKLGYFLAATIFLNSILPVLHGVAVGAGWQAYVGLINITCYYLLGIPAGALLGFKFKLRVQGIWFGMLIGTVLQTTILLFVMLRATWRNEAVEAEERLRTWGGPTETPNISLESNSAS

SEQ ID NO: 116426 - protein, 64 aa, Gossypium hirsutum
  Clone ID: AW561916.1.pep
EYSLEKHHHGDTDKSNAVQHNQIVSRFNTGDGVENPYPDLVKPRDYREQIRLWPTTMNLQRGSQ

SEQ ID NO: 116427 - protein, 188 aa, Gossypium hirsutum
  unsure (1)..(188): unsure at all Xaa locations
  Clone ID: AW561914.1.pep
MGASVDAVERILNYRFRDKRLLEDALTHSSYSDATSYERLEFVGDAALGLAFTNHVFLAYPMLDPGQLSLIRAANISTEKLARVAVKHGLFQFVRHNAVGLAQKVKVFAEAVTQEDEFVAHGGSMKAPKVLADIVEALAAAVYVDIRFDLTTLWVIFRGXLEPIVTQKLYNNNLNCSLLFEKCQKQGK

SEQ ID NO: 116428 - protein, 122 aa, Gossypium hirsutum
  Clone ID: AW587511.1.pep
GLMLESEYSSAELQWTLLMSDSDMAAAAQQLMQLSDEDNSSSSSSNGNNNNKKIIAKMMKDGRYLEQSQNEITSAKIEEIFGKEEISRPTKKRRYRFLESIYKETKPMKVSYGKGNGNSLCY

SEQ ID NO: 116429 - protein, 134 aa, Gossypium hirsutum
  Clone ID: AW587506.1.pep
RVVFFYFYFLIFLCICFLPESYIKLSSLFSACRDNLQLLRQRYYYATWKADGTRYMMLITVDGCYLIDRSFNFRRVQMRFPCRHPTEGIGDGTHHFTLLDGEMVIDTLPDSQKQERRYLIYDMMALTIRLSSNR

SEQ ID NO: 116430 - protein, 71 aa, Gossypium hirsutum
  Clone ID: AW587491.1.pep
ICNLFKAAMEWLSHESQSFKKIPTGTESKEKQKKKRVTQIYKALISIKTRTRKTPNFLTLFLFNSSSFLLQ

SEQ ID NO: 116431 - protein, 175 aa, Gossypium hirsutum
  Clone ID: AW587478.1.pep
MATKKIIAICQSGGEFQTENDGSLSYRGGDAHAIDIDDQMKFSDFKMEVAEMFNCSFGAMSIKYFLPGNRKTLITVSNDKDLERMIKFHGDSITADVYIVMEENGADDVSNMSDSRSSRTTLSEAVPPLELPLDVVDDPLNPIFLLVPLLILMAPTILMHTLICHLRVCLFASFC

SEQ ID NO: 116432 - protein, 214 aa, Gossypium hirsutum
  unsure (1)..(214): unsure at all Xaa locations
  Clone ID: AW587477.1.pep
LRYKYGLFKQYITKDGQEEVAENWLEMGNPWEIVRNDVSYPVKFYGEVISGPEGIKEWVGGEDITAVAYDVPIPGYKTKTTINLRLWSTKVAPEKFDLSAFNAGDHAKAYSAMNNAEKICYILYPGDESLEGKTLRLKQQYTLCSASLQDIIARYERRSGEFLNWEIFPEKVAVQMNDTHPTLCIPELIRILIDVKGXLSWEQAWNITQRTVAY

SEQ ID NO: 116433 - protein, 111 aa, Gossypium hirsutum
  unsure (1)..(111): unsure at all Xaa locations
  Clone ID: AW587465.1.pep
MAVSMRDLDPAFQGAGQKAGIEIWRIENFRPVPVPKSSYGKIFTGDSYVILKTTALKSGALRHDIHYWLGKDTSQDEAGAAAVKTVELDAALEGXCCQYREXQGHETEKFL

SEQ ID NO: 116434 - protein, 220 aa, Gossypium hirsutum
  Clone ID: AW587463.1.pep
WIQSSNAHTAFADREPGKAMSRPCLELAKLFSIAVDFPKTGVPAEIPQELRVKEFPDFMEKPDKPSYQSYNVIGKLFREVKNLAPNECSIKLLTREKMKRFYDPDMEVEGFVDYMDDAFFYKSKYDYKLGNLMDYYGVKTEAEILSGGIMKMSRSFTKKRDAESISMAVRSLRKEARSWFNEKGSELDEEIDDAYAKASAWYYVTYHHSYWGQYNEGMNR

SEQ ID NO: 116435 - protein, 168 aa, Gossypium hirsutum
  unsure (1)..(168): unsure at all Xaa locations
  Clone ID: AW587460.1.pep
MSAMKRKPVQQKSQIRWKRKVLAALLVLLCFASLVLMETQYPQVVSLSSLRHRFIVKPKIAFLFIARNRLPLDMVWDAFFKGEENRFSVYVHSRPGFLLNKGTTRSACFLNRQVNDSIQVDWGEATMIEAERILLRHALXDPYNERFVFVSDSCIPIYNFSYTYDYIM

SEQ ID NO: 116436 - protein, 82 aa, Gossypium hirsutum
  Clone ID: AW587454.1.pep
RSRRSRHRQVYLLSIWLVKGFPLSRSASDGYEASGGEDSDRVPSRIVHRPTNWNNILFSEQTERVVKLKTPSSSGPVNGRML

SEQ ID NO: 116437 - protein, 230 aa, Gossypium hirsutum
  unsure (1)..(230): unsure at all Xaa locations
  Clone ID: AW587451.1.pep
VPWPARSRVSEVSHSGNKHSGSSEVAMKNSVTQVSASKTGSVKLAQGESATKSTSASLGSMKAAISPASAIANLKDVQARNAAVVGTSDPQTTAKDEKSSSSSQSHNNSQSCSSDHAKAGGLSIKEDARSSAAGSGSVSKISGNSSRHRKSNNGFPGSSGVQRETGSGKNSSFNRNLASRKNIXKSGLACERXVEAPMAVSNSHKFIVKIPNRGRXSPVQSASGGSFEVT

SEQ ID NO: 116438 - protein, 218 aa, Gossypium hirsutum
  Clone ID: AW587446.1.pep
GRPILLALEDIDGTPSFLEKALRFLEKFGTKVEGILRQSADVEEVDRRVQEYEQGKTEFGSDEDAHVVGDCVKHVLRELPSSPVPASCCTALLEAYKIDRKEARISAMCSAIFETFPEPNRRLLQRILKMMHTISSHSNENRMTPSAVAACMAPLLLRPLLAGECELEDDFDATGDNSAQLLAAANAANNAQAIIATLLEEYENIFDDENLQRCSIST

SEQ ID NO: 116439 - protein, 114 aa, Gossypium hirsutum
  Clone ID: AW587444.1.pep
LTHIHIGIHTHQTTSTCIIITITITIRVYFFLFSLFPFPFICTIFIKGRNHSKSSPFTCHDDASVMYGSLEGMDGPILDNIENQQHIINDDVADNSSSHFYKAGSTFYIQTVLW

SEQ ID NO: 116440 - protein, 187 aa, Gossypium hirsutum
  unsure (1)..(187): unsure at all Xaa locations
  Clone ID: AW587439.1.pep
METQSVKLGTPSKQATVSKVRVVVRVRPFLPQEITARNGNSKSCIFLLDHQDNDSSDEVSVHLKDPNTSRNESYRLDSFFDQEDDNVRKIFYREVNSLIPGIFHGFNATVFAYGATGSGKTYTMQGMEEHPGLMPLAMSTILSICQTTGCIAEISYYEVYMDRCYDXLEVKNKEISIFDDKNGQIHL

SEQ ID NO: 116441 - protein, 129 aa, Gossypium hirsutum
  Clone ID: AW187676.1.pep
LERKSSLHEGVESPFAAEALACAEAIAVGRRLEIDTVEIEGDSLVVIKKCQSKENDRSEIGSIIRNIHQHERYFKEIYFRHISRTDNQPAHVIASESLKRRLEILLVRAIPEFARRYFGLGTHRARELD

SEQ ID NO: 116442 - protein, 230 aa, Gossypium hirsutum
  Clone ID: AW187665.1.pep
DDRQKLCLLCFSIFPENAEIKKRFLRFWWVGENLIARNGKDEMGDLNDTLTTFVEKRLIEPVLKKNRLQPRSYKVTPIVRSCLIHFAKKEGFFDYDQDGKPIMDFSSCNKACMVKSERATASWFADYLKGNDKDGNERATACWFADYLKGNDKDGNSKKPKEQEQHQEQGKLLQGKLSADLVKLQMLFNFPHENTLIRASQQIDKLQTLFNLSKQFPDPTEWFSKMTGIV

SEQ ID NO: 116443 - protein, 135 aa, Gossypium hirsutum
  unsure (1)..(135): unsure at all Xaa locations
  Clone ID: AW187657.1.pep
FSYNMHNFCGKKRPAINLNLFTSLSHSFFCLNPTKPPSNFQYGVXGLGIXXAMTDSTHTHQSICFAPSPRSTPIPIVSSVKAAPSFGGGFNSEKFDELSDNDTFVISHFGDNLIKNQFGFGDDNXNCSGFTAAPS

SEQ ID NO: 116444 - protein, 176 aa, Gossypium hirsutum
  unsure (1)..(176): unsure at all Xaa locations
  Clone ID: AW187623.1.pep
VKSHLQKYRTARYMPETSEGTSEEKXTSIEEMRSIDLKTNIGITEALRLQVEVXKQLHEQLEIQRNLQLRIEKQGRYLQMMFEKQKKVEDEKGGAPSSASDDLLAPLPSKHPPCNNGESDSEALEQDHSRTGIGPRNAGTNEEQSSSRVCTKQKMETESTVHDESGFSVSKRRTEK

SEQ ID NO: 116445 - protein, 79 aa, Gossypium hirsutum
  Clone ID: AW187621.1.pep
FFSKSEGYTGKTHDRVRDTVEPHGRVGSHMGVGEANENTHGLAHNRVTHTARTHGCVYSHVKTGLITLFLFYFIYFLFY

SEQ ID NO: 116446 - protein, 172 aa, Gossypium hirsutum
  Clone ID: AW187617.1.pep
MFSTLDIAGQNLSRSADLTSPKELPRTTVDRSIFGVDLKLKLQLYKVRFLLLTRNIKLAKREVKHATNIARGRESSTALLLKAQLEYARGNHRKAIKLLMASTNRTDTAISSMFNNNLGCIYYKLGKYYTSAVFFSKALSNCSSLQKEKPLKLFTFSQDKSLHITYNCGLQY

SEQ ID NO: 116447 - protein, 63 aa, Gossypium hirsutum
  Clone ID: AW187611.1.pep
IMGINFRYFLFIIKKKKDYMENVNSFSLSLSLSLYIYIYMYIYINFGCYLTNEMTTICMGCLK

SEQ ID NO: 116448 - protein, 69 aa, Gossypium hirsutum
  unsure (1)..(69): unsure at all Xaa locations
  Clone ID: AW187608.1.pep
PQPIVEDLSKEKVGWEREGVNYRKSRDGYXDSSSDHVNYDGLAAASLSNSEXWHAXXSEPXCLDPAEKD

SEQ ID NO: 116449 - protein, 199 aa, Gossypium hirsutum
  Clone ID: AW187599.1.pep
YSKSKGTPSVEPKANAKIGETPSSDTKENFKATFEPTSDDKVLLKSPSKSVSKTNSNAAETSSSSPKVPDSISDDLLKNKKVTDKQQKNARQSSELENPSLTLQETGIDKAGGLREPFQSKQEDEKLPVSQPPMTRSALEENIVLGVTLEGSKRTLPIDERLTSSAVNAKEVASSSRNGNGSTAGDKKDGQILSTPNNQ

SEQ ID NO: 116450 - protein, 135 aa, Gossypium hirsutum
  unsure (1)..(135): unsure at all Xaa locations
  Clone ID: AW187591.1.pep
MAEAEAAISKQEEGGQRDNHPMTKGRKEKRKEIKKMKRKQLRKEAAEKEXEAEEAWLNDPEEQKRIAREEEDERSRRDLALREFEERERAWIEAMDINTHPREDDDDYEKIRDDSEDARGDPPRREHSGDDWEYV

SEQ ID NO: 116451 - protein, 151 aa, Gossypium hirsutum
  unsure (1)..(151): unsure at all Xaa locations
  Clone ID: AW187583.1.pep
MQRLVIHHRPPVISRRKLPLLVVVDSFPSFDSVSRLPISPSLQCRKISRLSSTCSTFRTRASNVGIGSGGYENKDEREDSIVKGPRSDSSSEALKPLSQIPYPLSVAGVLLGCTLVLSLIAFAKGGPASLLXAIXKSGFTAAFTLIFVSXI

SEQ ID NO: 116452 - protein, 162 aa, Gossypium hirsutum
  Clone ID: AW187580.1.pep
MAGCLAVVETDRPENEKPVYTIKGQWQVHFARFIVYPSLLSTCPSLVPKSRRGRASSGNWIATSSPAASLQIISDLSSSETILSICLGGKILEEHYISKLHVSWPQIQCIPEIPARGSRAVFVSYKDCADQIQKFALRFSTHHESESFMNAVKEEFQGDAET

SEQ ID NO: 116453 - protein, 163 aa, Gossypium hirsutum
  Clone ID: AW187572.1.pep
MSSSIFNNNSISISVSDDDPDELGRMRVRVRRKRKKHGDQRGRTECTQLLIRWFVKYWILLVFLPAAALLIFEATRIGKKPGLAVNSGVNEVKKPGSLGNIKPISKLKELSNLNRLDPTTHVVGGVRERRLKLLPAEEIEHLELPLNEESSSNLVKRLVYISE

SEQ ID NO: 116454 - protein, 146 aa, Gossypium hirsutum
  Clone ID: AW187569.1.pep
MMRRPSLSPSNQILKAYFHSKILVSNSDFDGGDNDLDGASSKVNISFLFISLYKKKTICRNKSKILKTKKKVSNHILIILAAFSSIQYFVIHFTAYNRLYIDKIKYKIYRFPFFFLYSIVVILLYLLSFAVVISFVASTNGANWRW

SEQ ID NO: 116455 - protein, 79 aa, Gossypium hirsutum
  Clone ID: AW187565.1.pep
CWFLDFLYITRWYPLNVEENLSVYLIIRVVLWLINYPSIAVSSEQKGLCIKCVLILTKHRIHGLNNFCLWSSDVGFLNL

SEQ ID NO: 116456 - protein, 85 aa, Gossypium hirsutum
  Clone ID: AW187562.1.pep
TRAGLTRRVMFAILGVKFYFVAFSDIFRPSLIVSGGILRRAAPSPTFDTGTMKGADPWVIDNRLGKVINLLSDHSALRGSSSPSF

SEQ ID NO: 116457 - protein, 190 aa, Gossypium hirsutum
  unsure (1)..(190): unsure at all Xaa locations
  Clone ID: AW187561.1.pep
MEVVDHETPSLENGKTDKEVEENANVLQFMDSMDAYLTLIHSLSSTLRRGWLELASARHSMGASRVNTVLLDHTSHPAATSLLVTQDEGKVDSGKPHFTLCKWASSSNENSLLGEKQSXQDKLHPQLRHRGSTELYEEKTSSENKASREVDDPVQKERSKSLSMFGTLVSPKLRTAQLSFEAALETLVEM

SEQ ID NO: 116458 - protein, 71 aa, Gossypium hirsutum
  Clone ID: AW187557.1.pep
ELVKQRPTLAPASHQHVTSYEASSEFSHQKFSCPWCQDLMPNSFGWSLGSSQLTSNFVQRSHASWNFKGTA

SEQ ID NO: 116459 - protein, 189 aa, Gossypium hirsutum
  Clone ID: AW187555.1.pep
MGNCVTVYKNKDPADMDLSARIQSPIKENNVRREPSIVGYDSRLQPSSMEQETNLQEMGKTEESFFDSQPSLESDFEDFFTANGDSASSSGNSPNHQKSNHSMEGAVDAHGESPTDTKKQLIELFRESLDNDDDGNSPAGSSKATPYRGHLPRKDVKAAESAQCCLPSLVRNLSFGERKKRLPSPAAQY

SEQ ID NO: 116460 - protein, 94 aa, Gossypium hirsutum
  Clone ID: AW187550.1.pep
STPAHHQNIITIYDQQFLIDNLVEHERDDCKGKKESECIEKKKNRFKIRNSLKCSAARLSWMLPPKKSKDLQDQFFLSSDVNPLNVLCEIVQRS

SEQ ID NO: 116461 - protein, 193 aa, Gossypium hirsutum
  unsure (1)..(193): unsure at all Xaa locations
  Clone ID: AW187541.1.pep
MAASLLNKALKPIKHPNFLSGLRSLNFSSIATAHGNPSDGPSSSSFTFDNANNNKEKDDNSIYIKPPTSNASTEKTTSVTMPMSFMTGSIVGKRFYEKVTTRESDDGVGWTVMLDYRTLKTPSKRPLKLPTLALAKAIAAEWEYXQTDGIRPFTMPLMKLACTALERVPLTRTKIIEHLMKKFDQELVFCRAP

SEQ ID NO: 116462 - protein, 215 aa, Gossypium hirsutum
  unsure (1)..(215): unsure at all Xaa locations
  Clone ID: AW187536.1.pep
RINPSSMQEPIAPIFPTGDTARQSVVLSSQQSSRLIPTDHSLELRSAPVADNASSQNLNVVNHVPTLPRNMQPFRWNGGSGSRAGSSSSNLSVARDFVPCEGPQSRSIARNLLDHPMFVPAPELRPMVRNPVNRGLXTXNASVPGNVASTYRGGSSSGANESSASTWVPHPNPSPQYPRRLSELVRRSLMSSTGAESGRHVNHSPLSSGLPTSPD

SEQ ID NO: 116463 - protein, 83 aa, Gossypium hirsutum
  Clone ID: AW187535.1.pep
GRRRQNLPTKPAVPVTRTTGIGYGNMREYQSRQSHWTPPSDTMRHRISEPKEVREFMGNSYRISSKEPLHTCVCPRAQMGLVV

SEQ ID NO: 116464 - protein, 119 aa, Gossypium hirsutum
  unsure (1)..(119): unsure at all Xaa locations
  Clone ID: AW187534.1.pep
TPPLATILIIIAMPTXSVPVVNTLXLIEQPHSSFPXGSPXIHYPGACIDIVIVLIWSGKDIPFGAEXVGSISASLVTYASMXPLHRELLLNSGTARGFIDVRAAMGDVFSYLVWLPSNS

SEQ ID NO: 116465 - protein, 101 aa, Gossypium hirsutum
  unsure (1)..(101): unsure at all Xaa locations
  Clone ID: AW187533.1.pep
HKACDWCLIRGASXMSIISNRTNCCMVMRVHHPQRHSVVRQTTHEGVDTIAGGSFRSLVKRTEQVTLTHWDNVLWGYSGETDLRMFKTSPAVKPVKSSALS

SEQ ID NO: 116466 - protein, 97 aa, Gossypium hirsutum
  unsure (1)..(97): unsure at all Xaa locations
  Clone ID: AW187532.1.pep
LRICVCYSPQISQNVVARCGCIRRYVTLVSSPPLPDFSAILTPWFRRSTRXPKHLYRSXLDCMAPSIHQPRASVEKCENPHLXVVSPLGAACIYSLF

SEQ ID NO: 116467 - protein, 77 aa, Gossypium hirsutum
  unsure (1)..(77): unsure at all Xaa locations
  Clone ID: AW187531.1.pep
DTAKKSLPAAIVFHVSVSAVTNLLRPTNVYTFKLFISLTPHCVALADTTFRRLPCPSKLTFISLLIILGCAVXYVAT

SEQ ID NO: 116468 - protein, 192 aa, Gossypium hirsutum
  unsure (1)..(192): unsure at all Xaa locations
  Clone ID: AW187527.1.pep
ISHERGKAVEVYNNIDIFHDYNRTSSNVPCKEHPQLSSAGVCAYCLRDRLINLVCSDCGVQRFSSCSCAGRGGEAAGIGRVSFLIENENKEQVPNAKPRRSTSAGNKSEEIFLIKRSNSGCAEIKKKKGFWGFGKLFGKKRDKDCYDCGKSEGGVDEKSDLLVVDCTGVSRSRSLCXFRGGGFFGXEDKSDL

SEQ ID NO: 116469 - protein, 93 aa, Gossypium hirsutum
  Clone ID: AW187526.1.pep
PNSGNYSFLFNLLIQVCMSLEDFESDYRCLKFGHLKNKNKLNNQQQTLGWQWPQLQTLSSLSICLTALLLEEKPLYRDKLLLEFAIASLLADG

SEQ ID NO: 116470 - protein, 77 aa, Gossypium hirsutum
  unsure (1)..(77): unsure at all Xaa locations
  Clone ID: AW187523.1.pep
NFFVFYEVNWYGRKNEIVIGICKEERGGFQFFYFFIKGNNMGPPPHLPQKKKKKKEKKKKKRKKEKKKKKNLVPNXI

SEQ ID NO: 116471 - protein, 163 aa, Gossypium hirsutum
  unsure (1)..(163): unsure at all Xaa locations
  Clone ID: AW187522.1.pep
CAMQISRTALLRRRALDGVMSVRSRFYKVSLSLVFVLWGLLFLFSLWLCHGDGYTGGSVAFGLSTGDEARVGDNEHSDSPGQCLADESGSFSSHDGFCTNGAEITALHVDSPASEETCKNDVSTHEQLDADNSVVDIKSENGSPKSDRLXHSVPVGLDEFKSR

SEQ ID NO: 116472 - protein, 196 aa, Gossypium hirsutum
  unsure (1)..(196): unsure at all Xaa locations
  Clone ID: AW187520.1.pep
LKKFNFLCSHFFFFAQNAYFHCRLFCCAIWATWGERNARLHEKTSRTGIETAHFVRYIAELDGVEQKTPKILQIARKWKHPPEQSVKINFDGAYDARLCQSALGVVARNSEGDVLRSSSKIHQGISSAFAAKALACRKVDXIGIDMQWPKIIVEGDSLTVIKKCKAKRQDKSQIGAYIQDIQQHIFRSRNFVFEYS

SEQ ID NO: 116473 - protein, 97 aa, Gossypium hirsutum
  unsure (1)..(97): unsure at all Xaa locations
  Clone ID: AW187516.1.pep
PQILMAGGRVYPXNNDTTDGVPNNLSVLLQNQRLHPLFIPXSSPSPSFLGTRSMVSFEDXLKTNRPKRSIFKMFDEQENGYDEYXEECFHQPEKKRX

SEQ ID NO: 116474 - protein, 96 aa, Gossypium hirsutum
  Clone ID: AW187513.1.pep
HIRRTSGAVITVQESGGLSDEITVEIKGTSSQVQLAQQLIQEFMSNHKDPVMSSGYRDTSYRSSFSQLGSSSALSSQPYGGYGGSSSVSGYSTFRL

SEQ ID NO: 116475 - protein, 92 aa, Gossypium hirsutum
  Clone ID: AW187511.1.pep
QKRIHMFLQLLWGVTLKMTKRYYSPSHHSIHQLQNIAFSELMVVNVKSKKPQMIQRPMCRQMTKRPVYRRKVTRHQERYYPKWNNVSRTHDI

SEQ ID NO: 116476 - protein, 83 aa, Gossypium hirsutum
  Clone ID: AW187505.1.pep
QYTLRVVQTMPIQLLLKTQNLASHLTLVNCRHTRMLIIQIQMEVDVVTCQVSILQLIIKTNGTDKGAFQFKFLSSKREGIIFI

SEQ ID NO: 116477 - protein, 145 aa, Gossypium hirsutum
  Clone ID: AW187504.1.pep
MMGGGGSVYWGRNQEESKQVKGIVVIFAWVSIHEKHLKNYLDFYSSIGWNSLVSRADFLNVYYPERAMSLAFVLLNELLEKLKIRTCPVVFVAFSGSPKACMYKVFQIIQETGEGRLNPEIQLIRNCVCGQIYDSGPVDFASDLN

SEQ ID NO: 116478 - protein, 167 aa, Gossypium hirsutum
  unsure (1)..(167): unsure at all Xaa locations
  Clone ID: AW187503.1.pep
ALFLSPGHGSLFLSHLSPYTTAPLLPFCHSPPFLPPPRPFSPSPESPGFLTATPSPFPLPLLIPSLSPLLSPRLPGPSPSRLAPLSPFPSGSAPRFSLLPSLAPRPLPLPLAPAPSPLSPRRPHLSWSCSPASSPSFPAPLPPXPPPSSVSPPPPSPLLPSRPLSLL

SEQ ID NO: 116479 - protein, 113 aa, Gossypium hirsutum
  Clone ID: AW187501.1.pep
KEKEKEMESRAVQGAAAGGMGLHAQQAQQMVIGPTSSSYPSNSTLITSNQTGNIPPSSAHRFSFNPLTSPPQHHLRQFHQQHHHHQQHHRNQQQLKPLHSLNSVAFDGSAQFQ

SEQ ID NO: 116480 - protein, 176 aa, Gossypium hirsutum
  Clone ID: AW187497.1.pep
GIELALDECVAILNHMRRLKRSADRAAAASSHGLLANTTTKFNASKRIPSWNCIARENSSGSLEEDLLTDVTSSLHHGVGSSLGIPPPARNLRAHRSAYDGSDSESEGVDIHSWTRSGGPLMRTNSANLFIDFVQNLDAEAEVNKGLMAHPGSPGFQICGGDSFHSPRMMKSDRGS

SEQ ID NO: 116481 - protein, 166 aa, Gossypium hirsutum
  unsure (1)..(166): unsure at all Xaa locations
  Clone ID: AW187496.1.pep
MEDLITNLSKSLGSFCNHLQSSCDALKQSIDRRPIPLDSASSTFVQCLNRRVSTATADLNLLDSMSFGTVSFEELLGHCYQIFNNNQTHLLHLEDHLKPLGYLPQVEIENEEEEKEVLDSNDRCFSVTNSAIKSLDEDPLLLDESMSLKNFGLSDVCLATLXSQAN

SEQ ID NO: 116482 - protein, 129 aa, Gossypium hirsutum
  unsure (1)..(129): unsure at all Xaa locations
  Clone ID: AW187492.1.pep
LVDKLVSDPSEGNAWHADHIVPVYKGGGECRLKNMRTLCVACHAVVTAAQCIERRSIRAKAKKKLKVIMADLKKAENMENNSSCGKDXGPSKIVEDIPKDELLVNVPGSAYSGGVNYNIQSELKNPPNP

SEQ ID NO: 116483 - protein, 95 aa, Gossypium hirsutum
  Clone ID: AW187489.1.pep
FQEFSVETLKTKFFSAFPWLRESTEINSHVIPVDQDHRNLPTRETLLSNFSTETNGLVSPVDQANGGFVSFEVLRSNLCNLISQLYDENNKEMGI

SEQ ID NO: 116484 - protein, 168 aa, Gossypium hirsutum
  unsure (1)..(168): unsure at all Xaa locations
  Clone ID: AW187482.1.pep
RRGGARERCVMXGTRLLVSLQQSQVQNYIVFITXYTPLIKVTSSIQNXYVVKIQNTCALIEASCSEISEAEKVEIIFVGLPPEXDAVLTFASFSTXLCCFNVLLTYCWNMRRDKSVRFKNCRFMPILWSPFRPHLWWILVGVVVFHLSIVAEVFSPASNVRFVADLEI

SEQ ID NO: 116485 - protein, 113 aa, Gossypium hirsutum
  Clone ID: AW187479.1.pep
ESLHSPLKVMTKDLWRPPDEGVIKLNFDASFQKEAKIATTVVLARDSTGPILGAETYLFEDVVDAFVAEARACERALIYATEMGFRCLFVPRIVNRAAHTLALEGRRRQVCGG

SEQ ID NO: 116486 - protein, 197 aa, Gossypium hirsutum
  unsure (1)..(197): unsure at all Xaa locations
  Clone ID: AW187473.1.pep
SFGGLDLQGSMRVHNHAQNPHSIHQHHHPNPRQGASLHASIHEDFPLKMGNIQNSDQIISLMDYNKGERGKSSVSDEDEPXFTEEGIDGHNDGSKGKKGSPWQRVKWTDKMVRLLITAVSYIXKDAAXGCGGGMKKKFAVIQKKGKWXSVSKVMAERNYHVSPQQCEDKFNDLNKKYKKLNDMLGXGTSCQVVXNHF

SEQ ID NO: 116487 - protein, 198 aa, Gossypium hirsutum
  Clone ID: AW187472.1.pep
LVSRADFLNVYYPDRAMSLAFVLLNELIEELKIRTCPVVCVAFSGSPKACMYKVFQIIQGMGEAQLNLDGSHLVRNCISGQIYDSSPIDFASDLNARFALHPAIRKMPGPSKLVSWIAKGISSGLDGLYLTGFESQRAEYWQTLYSSVDLDAPYLILCSENDDLASYPVINNFTECLQDRGADIMVVKWDGSPHLKHY

SEQ ID NO: 116488 - protein, 142 aa, Gossypium hirsutum
  unsure (1)..(142): unsure at all Xaa locations
  Clone ID: AW187469.1.pep
RPTPSLHPWSPPSPRPLPGLIVPLPLPSPPRPLLLAPLVRPAPPPSAVLAPPSSSCLPPPVSLPGGLPPLPSPPPRFPPSPASWCSPSVRTSPSPSFRCSPPPPLVVAFPLLPWWPSPSYRCGSPPLPPXPTFLPSPPPSLP

SEQ ID NO: 116489 - protein, 136 aa, Gossypium hirsutum
  Clone ID: AW187464.1.pep
MNVSLFQFSPNCLPQVGKFRNHPSISNNRPNTKIPCTKNKLSDSALALDLAINVQKINTHLEQKEKAMKKSKEFLFTELCQYLSLKEEEMNKKWRKMREEEKWVLINKFVDEWSVHFYPLSARSVKEMVDEYLQDD

SEQ ID NO: 116490 - protein, 81 aa, Gossypium hirsutum
  Clone ID: AW187454.1.pep
NPKPDDHAPVIINYDRFLQQRYTAATATKIAAADPAATSGGTFSPFSLLSAVSTISLDFPLIPSAAFFSTSSFNSNNFNLK

SEQ ID NO: 116491 - protein, 207 aa, Gossypium hirsutum
  Clone ID: AW187452.1.pep
MAANQSERQSEERGNTAITVTTTPPTLTPLVETKLKSACFKCKKQGHWAKDCPSNDNPTAKPSSPPLDTHLIPVLCCHCGVACTIHVSRSDANYGRPYYSRNCTCDKATRGRNFYKWCDDVNAPMCICGAGACTVNNRRDENGKETKYFTCRIKTGHGACGFLQFESPTSSRPRSEINERPMRLRRGGLSDITTHEISVTGNSQMDM

SEQ ID NO: 116492 - protein, 53 aa, Gossypium hirsutum
  Clone ID: AW187451.1.pep
HSYMSMYVNVYIEKKGTVDLMHRCWSLSYLSSMNDNPAFSLITSLHANPFIKY

SEQ ID NO: 116493 - protein, 123 aa, Gossypium hirsutum
  Clone ID: AW187439.1.pep
DKHSGRYNKEGERAEARNEIKRKTKKEEKERQGERRRRKVEKKMRGRRRRKDEKRRREGNSRAREKRRGKKKKGSKDLKRDRRRQEESRKEERRESSQERRKKEKEEHGREEERRTRMERKGK

SEQ ID NO: 116494 - protein, 105 aa, Gossypium hirsutum
  Clone ID: AW187423.1.pep
NTIFLNAVNKIPLCISCCRDLSPMKQTASDFSISSLCYFLRVHRTDPSLPSPDSSISVIFHHCSGLPILSPSVVPLPSNMVVHHTSILPTPIYVPLYWLLLRLVS

SEQ ID NO: 116495 - protein, 129 aa, Gossypium hirsutum
  unsure (1)..(129): unsure at all Xaa locations
  Clone ID: AW187420.1.pep
LGLTCSGSTXXESXXXXXYXXSRMCXXKXXPSHFTLYNTELYSLTYIFVPLSIXSAVSCSPSXLXHTTYYVLRVSTSYLSAIQLLWSSHVGTNRHCTMSARHHLHCVRVSHFKIRKKYYHYRMTISIRL

SEQ ID NO: 116496 - protein, 99 aa, Gossypium hirsutum
  unsure (1)..(99): unsure at all Xaa locations
  Clone ID: AW187416.1.pep
KSTSSPYHYKNXKAFLMRIFIXNKRREKVLQLXAXLTPAXIXIMTIARSPSRTKVRRNXKTRTGRKSDLALVEREEIDSVALASEELRLAFPFLSRGHL

SEQ ID NO: 116497 - protein, 74 aa, Gossypium hirsutum
  Clone ID: AW187413.1.pep
MVEDDHQFIERKPTFGQVILSIMRIRFYTSSLGRVGVGTQIIVQVKWREFSIGHGANLCFLPGFIEISLFFPHN

SEQ ID NO: 116498 - protein, 41 aa, Gossypium hirsutum
  Clone ID: AW187406.1.pep
GWQKGSKSPKRIRDTKGDIIFSFSKYEALSGYVSGGIILKY

SEQ ID NO: 116499 - protein, 135 aa, Gossypium hirsutum
  unsure (1)..(135): unsure at all Xaa locations
  Clone ID: AW187405.1.pep
KIKRLRFFQIRQARIPKRQAQLTPLAKAIDESSYCRETISPSLIKVPPSNPEIGSLQRFKLEVNLAISSTDSARGTLELPEALNXLPXPPRALDAFRPPRPIKSLPPSLYLEMRVPSPKFPREDLAELLFFFFVR

SEQ ID NO: 116500 - protein, 195 aa, Gossypium hirsutum
  unsure (1)..(195): unsure at all Xaa locations
  Clone ID: AW187404.1.pep
MDPSLPQNLEEYSASSTTIKFDRPLPLLRGPIPAGTSDDPSSGPYILAFKVLPSWAAAYKSCESKIISQCEEGARIGCAITASNKCKPPWWQSLIGWKSMDLKERERCEDIEMEACLVAAKEKCIDFAKEKCTTPFLTARIAVGEKEIMNKWVERMVHAXSLPEESKWVYFIGSDNLGGSEPRVTNYRASQYLGT

SEQ ID NO: 116501 - protein, 103 aa, Gossypium hirsutum
  Clone ID: AW187401.1.pep
MLISESSVFSPGEEGVYNVAMRGRHADAYSMYKRGTRDYINAYDKEQVRSLNGVSKEIGNPSWKRSFLYILLASLASFLYGYHLGVINETLESISNDLHFNGN

SEQ ID NO: 116502 - protein, 52 aa, Gossypium hirsutum
  Clone ID: AW187395.1.pep
IYITSNHCLTHPSITIYDLKVEQHPYDTRSIPQQQIQVIRECYSVLSCIRIC

SEQ ID NO: 116503 - protein, 91 aa, Gossypium hirsutum
  Clone ID: AW187385.1.pep
FKKKKNLKILRFSVLGRLKENTPPICRSVRDSTPKDSPSSDHHYNRWSLTRDRSPNFNRRLDRQRLNTKVSILFISFHTLKQNKNRNKEDF

SEQ ID NO: 116504 - protein, 106 aa, Gossypium hirsutum
  unsure (1)..(106): unsure at all Xaa locations
  Clone ID: AW187384.1.pep
KQHFLSDSVAPEEHQHHHDSTSILALNFRMILSILVNIQRLKHCLPATLHRHPHHHIYPSLLPPXDLHHCQTSSXCPXPTQFIXIFTTSINIKLSXNHTQTETIQK

SEQ ID NO: 116505 - protein, 149 aa, Gossypium hirsutum
  unsure (1)..(149): unsure at all Xaa locations
  Clone ID: AW187382.1.pep
MGRRGXXGGRNGGGVKSAXNTPSKFQKKVSLREEASGKKQTRGGGSTNVXXVLKHQHLQNLXVWAXGESSIPSLASFFGHRLAADGEASAIPQEPSFFRCQRCETILQPGFYCTVRIEGNRRXARDRRRKPRVSTRKCVVYSCHFWFGS

SEQ ID NO: 116506 - protein, 102 aa, Gossypium hirsutum
  unsure (1)..(102): unsure at all Xaa locations
  Clone ID: AW187378.1.pep
MAFRGKEIMXKLLKKVREKNLAHGVKEQLQKSIPDSKVVINLAKHGLYTGHHIXFGNRTSENGGNKYPHFIFATSLNFFCLIYLFIFGDLDLCSKTLKLIQM

SEQ ID NO: 116507 - protein, 119 aa, Gossypium hirsutum
  unsure (1)..(119): unsure at all Xaa locations
  Clone ID: AW187377.1.pep
SRTLKSPSSKSIVSGYGGVKEEDXRNSNSSFAEFVSTEVVKEEETAEKETLDVKCDRQRAXSHLKELLEXSAELLQNNRLEELSVVLKPFGKDKVSPRETAIWLAKSMKGMMIEDCRRS

SEQ ID NO: 116508 - protein, 82 aa, Gossypium hirsutum
  Clone ID: AW187376.1.pep
VHCCIEVDFVETLNRGPPFYTYRAKADQIAQMVQRKYRQISVLLFCTNQVNHSINSIFATLSGHSYCKLFHAKETFFDNFII

SEQ ID NO: 116509 - protein, 124 aa, Gossypium hirsutum
  unsure (1)..(124): unsure at all Xaa locations
  Clone ID: AW187373.1.pep
KVVSCRPESKKKISTSVILCYFVFLGLLRSVFADNREKTARVERAISQSCGDWALPGSVEGGRXLRAPLLLLGVFSFFNFGGWVXFGPVKAVGLVTGLFLICWGLGQXGPITKIKTNNLLNFQK

SEQ ID NO: 116510 - protein, 186 aa, Gossypium hirsutum
  unsure (1)..(186): unsure at all Xaa locations
  Clone ID: AW187372.1.pep
MYKTKKLCAPLSTIFRGVLPTRRRLSPYLSNSQIPSLSSHLQSSSRVPPSYALHFLLNSNFSFQNLCSQSAAKLDSSTKRCWNCVADKTGTTPFLYCDSCRSIXPVDLSIDYFQIFGLEKKFEIEGERLKGKFQGWAKKLAPELVHXKFRKEKRYAAEHLVVYRCLSQANKRWSGAIYSWRLEGIY

SEQ ID NO: 116511 - protein, 73 aa, Gossypium hirsutum
  unsure (1)..(73): unsure at all Xaa locations
  Clone ID: AW187364.1.pep
PTAAQCLTHQWLSACPQVLKPSSTALEQRTGDGMSEKKMKDKDDREAMEAGMGNIXIDGGASKPSKETPSKLK

SEQ ID NO: 116512 - protein, 63 aa, Gossypium hirsutum
  Clone ID: AW187359.1.pep
LTRQFIIGGLSLQLINAGNNPILTNSWCLIYLNLQDLSCIGTKYVWSYISFSAGIRHFVVKLW

SEQ ID NO: 116513 - protein, 80 aa, Gossypium hirsutum
  Clone ID: AW187346.1.pep
QLLVCLTTYLYEGSDYHGGYTCFLRLVCLQMKKLFHSIFSGMISVSLIYIHYLIFLDLLGLCSHVFDNPIIFGSHYSCNF

SEQ ID NO: 116514 - protein, 76 aa, Gossypium hirsutum
  unsure (1)..(76): unsure at all Xaa locations
  Clone ID: AW187345.1.pep
ISYLKIYVALYLDMYVHMQGYIVYKCTFPVYMYLVLSMCSALMEMDLXHGMLQCAFPVHISLLCFTCTCTFRMMRM

SEQ ID NO: 116515 - protein, 87 aa, Gossypium hirsutum
  unsure (1)..(87): unsure at all Xaa locations
  Clone ID: AW187337.1.pep
MELSLQRRECDATPVAKTWRRNRHGTCYTRAGVDVRGSCRWPXLWREADGNPRVSENSNNLGLSGLIYFIRAMVKFLGFWIYSCFWA

SEQ ID NO: 116516 - protein, 185 aa, Gossypium hirsutum
  Clone ID: AW187331.1.pep
LSLKDIRENPPSLSVSAASETLDLENTHNDINLGRGDIDVNADAIDWDISVDNAQIDWDIGTLEETDDGGGGLGPYEIFNASDILQNSSPNEVAESDKTPLDKTESPPEISVSDISWDISAETPQIYVIDEVSLPNIQLENQTYAPDSLPLTRGTREERIQLLETEYRNKILDDFYEMKAFLNQR

SEQ ID NO: 116517 - protein, 121 aa, Gossypium hirsutum
  unsure (1)..(121): unsure at all Xaa locations
  Clone ID: AW187323.1.pep
MSIDNKEKPKIIQLFCPSVSKLIWFVAWDSHKLDIGSISRMFWLDPSTVNLNGHFISRGVDLVSSSVTWRXLLSFFSSKGLSTGTDDHKGALIFNGQLCIIWSNIIPTIVFLWGFSDEYNP

SEQ ID NO: 116518 - protein, 205 aa, Gossypium hirsutum
  unsure (1)..(205): unsure at all Xaa locations
  Clone ID: AW187319.1.pep
EGRSLLERCDKLLHSIXKMNAAQTELQPSPVSVLDASFYKDDSSTSPVMKRRMDFKDQVVESEDELWSPASAMSTAKSKSSDKSDDCDFNYISDILKASNYLPDDTDVFLLLEKQQNLKGKDTSKVYKLQRKLIFDTINEILNGKGELPPWKLKYPWSGETSLQQIWSEFEKIRRRDSADDLFEVICGVLRQDLARVCHYRLGVL

SEQ ID NO: 116519 - protein, 77 aa, Gossypium hirsutum
  Clone ID: AW187318.1.pep
LFNWATFSFQTNPNYLKGWKIFFRLLPFDAAPIFQIFFILLVPCKVDQTFFSVRKSVQLTCSKIYNSSLLKLIIFNV

SEQ ID NO: 116520 - protein, 114 aa, Gossypium hirsutum
  Clone ID: AW187313.1.pep
DCAWYITPFAHLIVSHITLLKDVFFLWFSSGIPFFCPSITYGPTPPYCYMGYPQKCLHQCSRSILSVRTCEFEHLFYTPFLRIGFHDIHLPNPSLFRASISLITVLSTVVSFKN

SEQ ID NO: 116521 - protein, 85 aa, Gossypium hirsutum
  Clone ID: AW187305.1.pep
KQWDFLVDQFKQEFCRLYGMTLEPLLNIYLQAGLSALKTPYPCCNCNYITTYCLTYIICQLSSLRVSRVLIKSIYGEDTGILLFM

SEQ ID NO: 116522 - protein, 82 aa, Gossypium hirsutum
  unsure (1)..(82): unsure at all Xaa locations
  Clone ID: AW187298.1.pep
GIYLFFFLKSAXNEPSLTMKQFNHPLLFLQTVSKAEHKQRKSKCLSLFLFXSFVQPQPFTTSVSSLFYLSHRPIPFSQENPF

SEQ ID NO: 116523 - protein, 82 aa, Gossypium hirsutum
  Clone ID: AW187292.1.pep
IKDLGAIAKVTPKMDFHKAASRKRGERTTIILMIISIKVIDEKAKITEKEIFIVRDTKLTRVIICSIRINPDSMTIWGSRGA

SEQ ID NO: 116524 - protein, 209 aa, Gossypium hirsutum
  unsure (1)..(209): unsure at all Xaa locations
  Clone ID: AW187291.1.pep
MDNIFLRSRSAKAKSGTSDIPAPSSPPKLPEAVEPEAKDEEESPLMTTVRGKCITQLILLGAIDGIXKKYWENLNEPQKIAIMDILLSLVEFAASYNSYSNLKTRMQHIPAERPPLNLLRQELAGTCIYLDVLHKATSGFNDNNGQLLEPKSSQDTDVSSDNNGLELAEHSYEETKLEGIAXEKLVSFCAQVLRDTSDFQSXIGEKFRG

SEQ ID NO: 116525 - protein, 83 aa, Gossypium hirsutum
  Clone ID: AW187287.1.pep
QKMQKMVQARVKKMTEWAREESAVLEPRDTSTTDGSNIREAASLQHGLKQIFMAMEKLAIHFRQAYGELHQCTEKCKATQDNP

SEQ ID NO: 116526 - protein, 74 aa, Gossypium hirsutum
  Clone ID: AW187285.1.pep
ASKGKNKICFIISGKFSYFLSLSVLSEFSSSHSHSHSHSLFFSLFLPLLVFTGIYNINNKKTLRFQFFLKLKLN

SEQ ID NO: 116527 - protein, 151 aa, Gossypium hirsutum
  unsure (1)..(151): unsure at all Xaa locations
  Clone ID: AW187272.1.pep
VLQQERKNLIRLNPASCPSIAVSTPAATPSPGSSVAGAYYRCVAPFVLPSRHCRRSGEAAASSVAGVHHCLRLLRFSLQSSPSRCAAGQSRPIPEKMGKLGKKARKFAKKNLQSVLKRKRQLKSMCKKKASKKKQQDEXQNLEEDPIEKFS

SEQ ID NO: 116528 - protein, 34 aa, Gossypium hirsutum
  Clone ID: AW187255.1.pep
LEPTMSGSVHPPHQPRPPFPKKDRFFLNQSMGFV

SEQ ID NO: 116529 - protein, 182 aa, Gossypium hirsutum
  Clone ID: AW187250.1.pep
KNGVFDSSSSKLGDIKGDYFVNNEIDFTSAVIMNNEYLDFTSAVIMNNEYTTSKNPGSLRQSQRTKPCSMKDVINEMDFTSEIIMNDEYTVSRTPPGSRQGSSGSKLKKTEGKGVCKDFEEKCMRSESSSALTKEDSGIVKMPSTKCVDQSGLDTINAEAEKETHSDKAVASIEVVLKSSLK

SEQ ID NO: 116530 - protein, 170 aa, Gossypium hirsutum
  Clone ID: AW187243.1.pep
TFLQTKQEMRDSTPVHASAAEDTNKGKKRRPEHHELSQNQVGNYLIQSTMGSVPATFWTITNPSNQGISGSGAADPMWTFPSANNTNMYTSTTSSGVHFMNFASPMSLLPGQQWGTGIGAGGSFSDSHLGMLQALNAYRPTHSTNVSESPATGSHQVLHHGEEHRHDSSS

SEQ ID NO: 116531 - protein, 52 aa, Gossypium hirsutum
  Clone ID: AW187242.1.pep
RESQCKYSVYSLRIFMNYIVRIINLPCFTMYISTFFKRTGHFGTASFKMAWK

SEQ ID NO: 116532 - protein, 128 aa, Gossypium hirsutum
  Clone ID: AW187239.1.pep
LSNSTDIPSNVSPLKMGAFEGFGLSQGHVNPNLSGVQNMVSSSDGSLPRNENSANPPCWGETAGSREHDQSLLRSINGRYNNSNTPGLTNGKANNLSVSSSDFHVDKGPENVSTRSDGMVESWICSSD

SEQ ID NO: 116533 - protein, 93 aa, Gossypium hirsutum
  Clone ID: AW187235.1.pep
MGCFAVLKSKKKKSEQSVFVKPTARKEQMPTTLPEPQVQTRSLQSAPPSFKTRVKPIQPNNKATSNRTRTLSAPSSLNTAEQDALVSVEFEEH

SEQ ID NO: 116534 - protein, 76 aa, Gossypium hirsutum
  unsure (1)..(76): unsure at all Xaa locations
  Clone ID: AW187234.1.pep
LPPLASHRPHATIPXVPRFFDTRATPHSSITEGVSPVQRTPKPLKVWPWLCRLHRLSKGTEVSFYSIFVANERLGL

SEQ ID NO: 116535 - protein, 104 aa, Gossypium hirsutum
  unsure (1)..(104): unsure at all Xaa locations
  Clone ID: AW187225.1.pep
MEICQLSGHFFSGIPLQFNYRLRKSGRTPRFLTYANGVSCYQTENTGQDSQNRMFILGMGFVGQFFAEELRNEGWIVSGTCXXMKKRNELXERRLDVLLFDANH

SEQ ID NO: 116536 - protein, 193 aa, Gossypium hirsutum
  Clone ID: AW187210.1.pep
SMFRIALNRRLFRISRKKDPPYFSCSVASYVLVRNLKAYIMSSSCKEKGTLEALESMLIEVARVRLHGFSEREISVVRDLLMSSIESAYLERDQIESTSLRYEYSQHFTHNKPIIGIEYEAQLQKSILPDILASEVSKFAEKLWTSCSCVIQIVEPQAFASVDDMKNIVMKINKLENERSISPWDDEQIPEEI

SEQ ID NO: 116537 - protein, 180 aa, Gossypium hirsutum
  unsure (1)..(180): unsure at all Xaa locations
  Clone ID: AW187205.1.pep
ISNPDPSVRDSAIQCLTTHLNTRPSINSCSSXLQTWKTLYGHQTLKSPDVQLTPTQLSSSIGLHPTRPYLCHLTTSFSIDLSSLTLLDDXPTSPLYQPIPPMISFPLSAKKPPRRGSTSVSGRSSGCIWTPTCCSVGAAAPYGTCSDFPVAIRTDSIGELFSTCGDSSRVSDVIEARIRT

SEQ ID NO: 116538 - protein, 222 aa, Gossypium hirsutum
  Clone ID: AW187204.1.pep
SNPVTPTAYFPVVIQPDGIPNNSTEFLLDTRASIASRPDGRGVRHNLASASAAFSRNSSKSAPNQTDSLTRVSDGQSKHSANRGNFTDSSSPAAARTQQGRVASGSIQSIGNIPGGKLPSHHNQLKMDLPAGNTFSDYGSSAPGRGALDKLRPNISVGRVLNDTHGYPNTLGEQNRGPKTNRLKNQFMVKAYTTKAGNSDAERNIVIYTDQYNKDDFPIDYV

SEQ ID NO: 116539 - protein, 83 aa, Gossypium hirsutum
  unsure (1)..(83): unsure at all Xaa locations
  Clone ID: AW187202.1.pep
ILKIPPKIQSVPLPFYIMLIFSLITEKENXQIQYFLLCCCLSFLACCFGFAGVKRVLXGGMWATFGGRHAGLGTGPGLSSFKF

SEQ ID NO: 116540 - protein, 205 aa, Gossypium hirsutum
  unsure (1)..(205): unsure at all Xaa locations
  Clone ID: AW187193.1.pep
MNQRSSNLLDEALGLDQVIEPWPLRGRVVAVEDQVDTSGSFVLHHLLKRSLSPNSSNVAIFIAFSQPFSHYDRILRKLGCNLVSQRDNSRFFFFDMLKLQCPNGDEGITPEGGLIALYGKIHKTISALPEISWKNVSIIIDDLSLMEVAANGSSDYVLDFLXYCRTLTSEFDCSLITLNHEDIYSNEDRPTFFIQMEYLADILIK

SEQ ID NO: 116541 - protein, 66 aa, Gossypium hirsutum
  unsure (1)..(66): unsure at all Xaa locations
  Clone ID: AW187186.1.pep
IFLCRIFLNPQALAALCDSITDPKNXFKCTAPFFKKTVADSNAPVQEKALDALITFLKAADVDAGR

SEQ ID NO: 116542 - protein, 215 aa, Gossypium hirsutum
  unsure (1)..(215): unsure at all Xaa locations
  Clone ID: AW187176.1.pep
ICRQVILPELKADEINSNLLNFTVDNPNFAQDKQHKLWMDLLSRSEKELRERLVGFSFSAYRSFASNSATTSSEPGYWYPFGMAQMEQWVANNNHQVHDQLKVVATEIKTCKRSRCIELAEEDKEQCSYCSAPVPFESPKFGVCXGMENNGXXGQXHKLARCAVTMQVCPITPLWLCKCCQKWISKLAPESLFKMPQQHCLDYKFSPEPSSIKVA

SEQ ID NO: 116543 - protein, 162 aa, Gossypium hirsutum
  Clone ID: AW187159.1.pep
MFTTSPDHLPHNKSLEIKQDDKFFSRLLSKENSVANPSFRVYYGGLPGAVPFMWESQPGTPKYTFSDTSIPPLTPPPSYYSNSNSNSKPIKNKHSRSGLFQALFPKIISLKKTSSLVPTSPPPSSSSPMFLAIRPGKYQKRSRFLTPDDEVDTAAIGSPTST

SEQ ID NO: 116544 - protein, 170 aa, Gossypium hirsutum
  Clone ID: AW187149.1.pep
NIKDPVLFSESAKQDVPLYEDDNRLPSRRTDVNYTLYSAVTGKDLICRSDSRFEVWGTKGYNLHVRGRNKIMPGHHVIDLGRGLNSTFGSSRSRRPKFTKKRKGDSLGNRYFSLLYRDELDVPELVASHWVVPAIVAVTGFVLILSIWRIHHKRRRRRRSASGRLANLYC

SEQ ID NO: 116545 - protein, 181 aa, Gossypium hirsutum
  unsure (1)..(181): unsure at all Xaa locations
  Clone ID: AW187147.1.pep
MERSTGSNLQIQGQRTQSTAIVKVQQEPSIKIEPTVGGQLLRKLFQIIFFVQLFLVSILVIVLTIRGLIYAGSTDRFHPKKWYPPLLVSTASAGIVSFIWQSITFHCPSKAIKXVFWFTPLLTCAVGVLHILIGSPLSLAAGTIAIISGVIQSLYACWVNSKFDYASKILTVSTSAPPYNT

SEQ ID NO: 116546 - protein, 77 aa, Gossypium hirsutum
  unsure (1)..(77): unsure at all Xaa locations
  Clone ID: AW187140.1.pep
VYYSFWLSGFLSNQESPFTDLPQNDVELTPDKVXDEKEGGPTFHCDLCDAKLVYTIAQAFLPGLSTACVDNTTGDVF

SEQ ID NO: 116547 - protein, 146 aa, Gossypium hirsutum
  Clone ID: AW187129.1.pep
DMIFLINPERPHWKCCGKDQSSVQKDKSSSNEVGSTNSDSTAVTQVSDVSDSSKSFNVSNNDADSEIPQMDIVFVHGLRGGPYKTWRIAEDKSSTKSGLVEKIDEEAGKLGTFWPGEWLSADFPQARLFSLKYKVCLSLVVSKSSN

SEQ ID NO: 116548 - protein, 74 aa, Gossypium hirsutum
  Clone ID: AW187124.1.pep
RPSSTRDQDSLQLAPIAALSGRRLIEKAALPPPLATYLLVLVARSGVKSAVRRKNRSRPYQVIRELLSSASPLP

SEQ ID NO: 116549 - protein, 102 aa, Gossypium hirsutum
  unsure (1)..(102): unsure at all Xaa locations
  Clone ID: AW187123.1.pep
LLRTFEIIILLQSSALSLXDLKPKSNHHYKACGTLSPDIIPARMPSGLSPDITPARMPSRLSPDIILHYHAHIYIYHNTLAFHLHYLNTSTTCLSTIPLSAQ

SEQ ID NO: 116550 - protein, 146 aa, Gossypium hirsutum
  Clone ID: AW187109.1.pep
MAGGAEIKAPSPNVNGKAEILKGNFEPTAIEVEPLPPVVPENGVDKPSEKSRNIVLGRNVHSTCLTITEPEVNDEVTGDKEAQMAGVLARYRKNLMERTKLQLGYPYDLDFDYGALAQLADFSIKDLGDPLLESNYGSSCGGWEIG

SEQ ID NO: 116551 - protein, 66 aa, Gossypium hirsutum
  unsure (1)..(66): unsure at all Xaa locations
  Clone ID: AW187104.1.pep
LKTRIHLNLDHDKSKQSSHMIFMHDESCTIIMKILIPQLTNITRGGKKTKDLKQDGCXIVVGRDQI

SEQ ID NO: 116552 - protein, 84 aa, Gossypium hirsutum
  unsure (1)..(84): unsure at all Xaa locations
  Clone ID: AW187103.1.pep
HGHWTNKFGLLLIFILIYFWFVFYNGLGQIGPSTLTKCVTRFFXKVRIQGMLPIARSILSNIPHLCHVKKGLRNLKSCNSFFSL

SEQ ID NO: 116553 - protein, 71 aa, Gossypium hirsutum
  Clone ID: AW187102.1.pep
TIFMIIKPSVRFCFHFLFFLSQPISLKIHFTHKLRRNSNIKKTSLLPPHYLMLAYQKKNVFISAAQKLTVA

SEQ ID NO: 116554 - protein, 132 aa, Gossypium hirsutum
  Clone ID: AW187092.1.pep
MNCEVCQLKELEVEHFEIREVLRCILHTIVFHRALGLVRPKDVDLELFEITYVQCGDVELEKKIDEKIDHFISWVEKHPNKKSQICLSFYEVKSKQPSWFTNKTERLYWEQWYINLNVTQHPKHHSSKSHHT

SEQ ID NO: 116555 - protein, 181 aa, Gossypium hirsutum
  unsure (1)..(181): unsure at all Xaa locations
  Clone ID: AW187086.1.pep
TFLCFIRLSDEIQIQDFVISGELAGVYKSFRLGFPRAIWGFLFLFLFCLIMMTGEDNYNGSSGFLPTGYPAADFEFDGLSIDLDDFNRILEETPGSFQSNPEDPSFRNISQGKSAPETNQFQSELLSSEFAFGDLLKYPSEASXAXAGSLGGLFDYHRELEPPAHDSLVQTSSASFRDFFS

SEQ ID NO: 116556 - protein, 137 aa, Gossypium hirsutum
  unsure (1)..(137): unsure at all Xaa locations
  Clone ID: AW187082.1.pep
MAEVRGANTWREELASLVEDTGILYTGEAATFSSLPPFNPEKSTAMAAAVSETDHETEPPETLKEQVTEFLKSWGEMVLELGRGCKDILQQTVVTEDSFVVQKLGGPVARVSXRLRFLNEFLPEDRDPVHAWPVIFF

SEQ ID NO: 116557 - protein, 185 aa, Gossypium hirsutum
  Clone ID: AW187072.1.pep
AAKVTYEKVIPHVVDFLQTHGEQARFQFTGHSLGGSIAVLVSLMLLIRNVVRCSMVEPVVTFGSPFVLCGGRKLLDELKLDDAQIYNVIMHRDIVPRGFSSNIPGFHISVLKLFKRSLHSHTCLNENKFMYSPLGNLLILQPNAKSSPGHPLLPPGTAFYALDTTGYKDTSNAAINGFLNSPHPL

SEQ ID NO: 116558 - protein, 105 aa, Gossypium hirsutum
  Clone ID: AW187065.1.pep
HRRSVSSELTTKEETRSETAPSHLVQRNDSWPSIIFYPVNLVKGPRLISRIRVRPLLPLFWGGSSSLPTIDPDLFSFVLGITKPSLAFVNHTKAEHQLWQGPLKG

SEQ ID NO: 116559 - protein, 147 aa, Gossypium hirsutum
  Clone ID: AW187060.1.pep
MPPTHQSSSTTKVSTFFSATLLLWVISVFFQILFNKRRDLLYIFAGGCFYQFANWVIRFSVSRDPLFVNTSVSLLHSAVTSISVVFILLNQWSLTSFKRRFEHKELVEGTWPWAYQALCFSCGYFAYDQQDMLQYRLYSGFIPSILI

SEQ ID NO: 116560 - protein, 168 aa, Gossypium hirsutum
  unsure (1)..(168): unsure at all Xaa locations
  Clone ID: AW187056.1.pep
ATAAVLDISGNKFYGSLTTVLRRFSSMNLSENYFEGSVPDFVLGNTSLGTNCLQNVSNQRTLTDCVSFYGERGLSFDNFGPPAPESGKSNSNRNRIILAAVLGGAGFIMLLTLFVLLVLLVRTRKRVSHXGIDVXPVCAETTPPSPGLAINFSSLGDLFTYQQLLQAT

SEQ ID NO: 116561 - protein, 117 aa, Gossypium hirsutum
  Clone ID: AW187053.1.pep
QYWTMPEYKCYWRVLNPETKVSLIFGPLAARKYGSDMTLWESLQGRGDPYKTLLREATTALLNSYNTLQFPYNSIGAVTRTNWALMGSTRGVLITALRFIRANSGSGRVTCKLTPCK

SEQ ID NO: 116562 - protein, 88 aa, Gossypium hirsutum
  Clone ID: AW187052.1.pep
LYSSLSVLSNYSSVHPPFIHTLPIHTLGLAFHPRLNVFLLNPLSMPIYPHLYTINIRSKPRSLLARHGVDSLLNVRVFSRTPSCRNVP

SEQ ID NO: 116563 - protein, 178 aa, Gossypium hirsutum
  Clone ID: AW187050.1.pep
MQKIRLKSGSSASSAVIRTALPLPGPPLGNTAFPQEAYFEIKILYCHGDDDSGKLKELGEKTKLIHEHEDSHHVINKVDELKSATKDDGKGEEQVMLSMGLTAGGSLPSKLPGTYPGSIGFNSDGSVFLDGIKLIFESEKEDWGKPGKVIGCGFNPKQKKVFFTLNSELIHVINCKSE

SEQ ID NO: 116564 - protein, 90 aa, Gossypium hirsutum
  Clone ID: AW187046.1.pep
YQKGTVLTPILSTSHPYPQTRISLQQRFLGCWCVRYPPLEFAACLTSLLGPDAYYPSRLDQIHALTLQAPDSCSHFGLKFTEKGILIQLA

SEQ ID NO: 116565 - protein, 214 aa, Gossypium hirsutum
  unsure (1)..(214): unsure at all Xaa locations
  Clone ID: AW187037.1.pep
QRHMGGQMQQSNAAAAALYDHAGGGGGGSLHNAGPAGGDAGDAVMARWLQSAGLQHLASPLASSGIDQRLLPNLLMQGYGAQSAEEKQRLFKLMRNLNFSGEPGSEPYTPTAQSLGGPGTSDGFYSPKFXGDFGAGLLDLHAMDDTELLSEHVISEPFEPSPFMPSLNKEFEDELNVTTNRQQKEISDADASASLISANEKEMSARXXYVAKIK

SEQ ID NO: 116566 - protein, 95 aa, Gossypium hirsutum
  unsure (1)..(95): unsure at all Xaa locations
  Clone ID: AW187033.1.pep
QPSPFLAKRGLCSANRHHITHRGKECGKMHXLAKGMPQGIXKKVGLVLLQLRKLLIREQGQLLPWHSYQPKQNNLVIFSLQFFRLFPFSDLLSWD

SEQ ID NO: 116567 - protein, 201 aa, Gossypium hirsutum
  unsure (1)..(201): unsure at all Xaa locations
  Clone ID: AW187029.1.pep
QNFSSPEPHINGKKGFSDYYDDYLWLGSKGNGGSSNLYPGDIIPFTRRPLFLVIDSDSSHAFKAERGEKAALLLSPFRPMFKDPFSADITQNGSQFTFFLTAPLQAFCQMTGFALSDSDIKVLKNAENILSTAFSKWEVILCKSLXLDLVXWAQFCSNPFLRRLIIKFIFCRTVLSAFCPPKKSEQYVTVCLPQLPNSLSP

SEQ ID NO: 116568 - protein, 95 aa, Gossypium hirsutum
  unsure (1)..(95): unsure at all Xaa locations
  Clone ID: AW187015.1.pep
KPLFSEFHLTSPKYFLARVICIFLSYIYFNFMSLSNLDNYILQKGIFFHCWIGLVYMHFVLIVFGXRNLVHIIHILIRFSVRLSYFLQFGDLGSC

SEQ ID NO: 116569 - protein, 91 aa, Gossypium hirsutum
  unsure (1)..(91): unsure at all Xaa locations
  Clone ID: AW187004.1.pep
WENKTTSIPTIPQDVDPTIYASFCRSASSFSHLXLRLLNCNXLSSRSGIRHRLQLLSPSIWRRPYGVCKISELDSLAYRHNEVYDAPYPST

SEQ ID NO: 116570 - protein, 154 aa, Gossypium hirsutum
  unsure (1)..(154): unsure at all Xaa locations
  Clone ID: AW186974.1.pep
NXQSTPSLRIFSDQMPTYESFNHIDKLSVSTDRAVPQHVIDFSKEPQRSPLPKVLFAEWLSLDQECGPAAATSYGFNHNSSSNFQDXFMDAFLLNEGTFGGSDLHDGLSNGSANEMSSSLFDFETQISGNEFVGSLSGDDICSDFNMNNNVMYM

SEQ ID NO: 116571 - protein, 71 aa, Gossypium hirsutum
  unsure (1)..(71): unsure at all Xaa locations
  Clone ID: AW186965.1.pep
FFFFFFFFXXCRYRHCARRGRRTCDGYCDVCGVWLLILLLAARVSFCLCFVFWTSRIGLAIWACNICNWAT

SEQ ID NO: 116572 - protein, 117 aa, Gossypium hirsutum
  Clone ID: AW186964.1.pep
HTSVPVSKPQFHPIRRNSTPTSSSESHYLGLASFSSKNLKSTIVTSPFLTPPVLFLSHLLTRISTIPLIFPTIYFHHLSHTYAVIARPKYCTLLRAFISAVRLGAKYCVLHASLDFL

SEQ ID NO: 116573 - protein, 186 aa, Gossypium hirsutum
  unsure (1)..(186): unsure at all Xaa locations
  Clone ID: AW186960.1.pep
PNSTDPSDPIAPLRMESPIGQFLSQILISHPHLVLAAVEQQLKQLQTEWDTEQKKEELSASGTDLVLYXKIAEVKGNERKKTLEKNLYALVVLKFNESQVSLVPAINPSSKNSSSSIKTWANPEKKFQQLPSPETYEMIQNPLTLILGNPINDIQSVAQNNKIKVWQVYTASVMFGYFPKRVDERI

SEQ ID NO: 116574 - protein, 154 aa, Gossypium hirsutum
  Clone ID: AW186951.1.pep
MAASKDTITDDGNHTVELTVLDNEESAANGGSAAASSEEITPLLTQIERPKINIFSVSRSRRKPRELVIKAPETEISPVSQFMLWAWSGSKYSGLLCMALSSVIYFVMEILSENFTAQSIPLFETAFVRCTVTLILSYIWLRRIGLPIFGATHP

SEQ ID NO: 116575 - protein, 65 aa, Gossypium hirsutum
  Clone ID: AW186949.1.pep
SMVETLNKDIRVLGAISILGEMKSSCDIGYNFQIFALNTKIQDPKEQCFKENQKCVVYKSQTFEH

SEQ ID NO: 116576 - protein, 72 aa, Gossypium hirsutum
  Clone ID: AW186948.1.pep
SLGKRNITMMKAMTSSLSASHGSHMGRSPVGKSSLYKYLENNVTIMTLLVICNVKSTSTEHIRFGHSRKKLT

SEQ ID NO: 116577 - protein, 198 aa, Gossypium hirsutum
  unsure (1)..(198): unsure at all Xaa locations
  Clone ID: AW186938.1.pep
MKREEKSEEGLAEKEENLCEKLNRRILLVGNKTEGPCTPCPSWKLYDPQPQPQALSHHSYIFPHPPAAVSARKLAASLWEFHQYLHHHHHHHHHSQPKMHRGGLNNTNGRYHQRHHRNSLLKNKAIDFSXFLDDPCXSSDPDQPESASGLRRHIAQTLMKHHRSXEKNNQALQPVSPSSYGSSMEVAPYNPAVTPSSS

SEQ ID NO: 116578 - protein, 169 aa, Gossypium hirsutum
  unsure (1)..(169): unsure at all Xaa locations
  Clone ID: AW186931.1.pep
LLTALHYLTSALGVWVLGKFGFVHHDXITLDTAKKFLPAANVFYLAIFTNDNLLRHANVDTFIVFISLTPLLVALTDTTSMRQPCPSXLTSISLLIILGGSVGYVATDSSFTLTAYSWAFAYLVTITTDMVYIKHMVINLGSNTWGLXLYNNFLSLMMAPIFWVLTGEY

SEQ ID NO: 116579 - protein, 75 aa, Gossypium hirsutum
  Clone ID: AW186930.1.pep
GMVADYSTAKKSTTMTATKTLNSHSGSPTRDPRCLAKKGRQRVICVLKTREIKQLLMEDSATDLKKKPPFRTNGL

SEQ ID NO: 116580 - protein, 91 aa, Gossypium hirsutum
  Clone ID: AW186924.1.pep
IKCKEGISKGSKDSKPTIVVRNEVGKVLLNALLYPGIKTSAQKNSLVAIFHTSDEGGDNQEIVARTFLIRTKTEDDRNKLVTAIQEYAPAS

SEQ ID NO: 116581 - protein, 168 aa, Gossypium hirsutum
  Clone ID: AW186916.1.pep
IVCCHSLNDKGSPESGIYAKPSLHLLILLYAFVDSPGSHTFFFAVLVSTIIPTVSLRGLELHHYRQIIPCFSLSLSFINPPSTYDSYRHQTSFTYRSIHSLLYSHPLPPPLIKAPLTLIHHLHLSYSLYYTYSIFSSPTFSPLFLQISPFPSPFILNSTSLSLFTSSI

SEQ ID NO: 116582 - protein, 187 aa, Gossypium hirsutum
  unsure (1)..(187): unsure at all Xaa locations
  Clone ID: AW186910.1.pep
MKTFQSWNALVKKKNALAEAGNCGFKMRQLPFMGVICTVMLFIVYRTTDYQYHKTEMETRFHPFATVKDYHLHLGKLRGLPRGIMQARSDLELRPLWSSNSQSKASVTTNKNLLAMPVGIKQKDYVDDVVKKFLAANFTIILFHYDGNVDGWWDLGWGEKAIHILXHNQTKWWFAKRFLHPDIVSVY

SEQ ID NO: 116583 - protein, 206 aa, Gossypium hirsutum
  Clone ID: AW186909.1.pep
NSFFIRCFSVMADYTMESDSHVCSKRRTTSGSEQQETSLPPHLSPSLYESTADHRDSGLQDCQEVTAMDHSSPKKKPKCFSLLSQENQEMGLHSFAPKDVSLSGFFEKEKVDDVENKEGSFGVQEVDNQVNTIEANNKEHLGIGLEFEEKRVAKGKALESENVLEAEKKRLLTELEVGNIFGFATNSSKIDDGYGVGWYKGLDLPV

SEQ ID NO: 116584 - protein, 144 aa, Gossypium hirsutum
  unsure (1)..(144): unsure at all Xaa locations
  Clone ID: AW186908.1.pep
IDAAKQWDSELVXGRYIKDLEDNLSIIRLRFGDNSKPLFRKREFIVYERRETMEDGTLVVAVASLPKEIAAGLLPQQNNAIRGFLLQSGWVVEKLEDINSCIVTYVVQLDPAGWLPKWFVNRLNTKLVMIIEDLRKLVQTTAPH

SEQ ID NO: 116585 - protein, 58 aa, Gossypium hirsutum
  Clone ID: AW186904.1.pep
TLPASQSLLATEGRRVQEATYMTNLSRIDQLKVCITLLLSSNSSPSPMRFFPYILRKE

SEQ ID NO: 116586 - protein, 139 aa, Gossypium hirsutum
  unsure (1)..(139): unsure at all Xaa locations
  Clone ID: AW186899.1.pep
MGIPQKIDDYMKRTIDDSLGLPISTESLQLKLRSSEETQRRLRVQYLLLLSKLKEKDQIIERSKAEANMNAVALKRFVQENQKLAAECANLLSQCNKWEKECLLYDREXEALMDFGNETDEKXXKAEIXVHDLEKESXK

SEQ ID NO: 116587 - protein, 210 aa, Gossypium hirsutum
  Clone ID: AW186896.1.pep
MNDLAKVEIPANEVLVEVRSMALSPRGRGKNSSFEFVVEFLSVFRSSVYRDGSDYEMYNQFEHQKRRKSPDFSTVSLGSNRSMAGHVPSGYKSHKKKVGKNEETKMGESKPRQATRASLKKTEKPKAYTPKRKQTAIAAAGNDLPAALFVTFGPGSSLPTKDDLIRIYSRYGALDMEDTDMFFSNFCARVVFLRTSDAEQAFSSSQNDSP

SEQ ID NO: 116588 - protein, 100 aa, Gossypium hirsutum
  unsure (1)..(100): unsure at all Xaa locations
  Clone ID: AW186895.1.pep
PCMLESGRRRRLGRLAFFSRRKMLGGRIWGHRMYSRRVHPRLGHRETARMKRKTAWFHLEQVEARLPGLXRGLPSHQVSTFLHFFVFVKNVVTSCYAKIL

SEQ ID NO: 116589 - protein, 86 aa, Gossypium hirsutum
  Clone ID: AW186882.1.pep
SEGCLALKLFFVHVRVHSNDSCGFFCLLLLSFSFGYLVLGNLTNVVGKERVREREKRNNINKKKNKRERKMFTSEIVNSVSISKSQ

SEQ ID NO: 116590 - protein, 107 aa, Gossypium hirsutum
  Clone ID: AW186880.1.pep
MILSDERTRFEPELRRSVRQVQPSWSEFPGGVAESKVPVDFMKTHHHVHVHYLGDDQHQHQHHHHHYHHQHRRHHHHRRHNGEDKSGKVEEHVGGSLKRLTKFFIHF

SEQ ID NO: 116591 - protein, 165 aa, Gossypium hirsutum
  Clone ID: AW186871.1.pep
LVPFTIPFQPFFSISTVLEQTDGSRKPMLEASLIISLPTSPFSSISPSIQSESLHPLYSISLFYRPSDATSTSYKHRWSLEWIWILLLILITGKSPLPQYSTRFLFLLDNHPLQPIALLQITRYTYKCSFIHLSPLSQGFLITKSASRSSFLVTIPEHNSLCCRL

SEQ ID NO: 116592 - protein, 96 aa, Gossypium hirsutum
  unsure (1)..(96): unsure at all Xaa locations
  Clone ID: AW186869.1.pep
KNEKIIPEWTSMRVQISQKQGDVDEGRTMLSSFSFFEFCLFFLKNSVGFEAFFSKIRKRERENLXDLYSCGLQRQDPVAIRAPSATKHEGGSTTMS

SEQ ID NO: 116593 - protein, 144 aa, Gossypium hirsutum
  unsure (1)..(144): unsure at all Xaa locations
  Clone ID: AW186868.1.pep
MPEGKRVLDRISSHYDQLNALEGGFWLKVPMTAFLAANILIFTAPMKALAETCEADNSFFNMPLLLFVALIGATVGGLLARQRKGELXRVNEXLRQINAALRRQAKIKSYAPTLSYAPIGGRISEKEIIVDPRKEELISRLKSG

SEQ ID NO: 116594 - protein, 180 aa, Gossypium hirsutum
  unsure (1)..(180): unsure at all Xaa locations
  Clone ID: AW186865.1.pep
MAETKNLHEPALTSKRKPDLTSHDHDQQTLPHKSPKLQTPDETIQTNEQKQALDPSADNDSSVPESRPQDEDPGMHSEEEDEDDDYEDDDDDDDDDAEQEENGSTTVDRKGKGILIXEENDXDDEDDDEDDSRDGENESEGESDLSDDPLAEVDLDNILPSRTRRRXVHPGLHIAKNVRN

SEQ ID NO: 116595 - protein, 114 aa, Gossypium hirsutum
  Clone ID: AW186863.1.pep
LPSVKSLPVADVMKPNSRSSSLTLKTPKPLSFLPPFLSPLFQISHLRQLLQTPFLRPPIEPNDPFPLPSKQNLAHLRSGHHLPKPPLVIQDPTPNDYAETCKSLRSKRQRYMLI

SEQ ID NO: 116596 - protein, 117 aa, Gossypium hirsutum
  Clone ID: AW186861.1.pep
MAARSGGSSFVQPLHPPSPKSPPKYPDLYGKRRERAKVQMLEREISFLEEELKSIEGFQPASKYCKEVTDFVMANSDPLIQLKNQKSCGFWKWLCGLPCFNMACTCCRNSGCCCYLN

SEQ ID NO: 116597 - protein, 170 aa, Gossypium hirsutum
  unsure (1)..(170): unsure at all Xaa locations
  Clone ID: AW186858.1.pep
TVSNTMKRFFKPIKKEGSAKXPSLSPSKNGAENGDALPEVDVKKEPLKFLTWNANSLLLRVKSNWPEFSNFVSNLDPDVIAIQEVRMPAAGSKGAPKKPGELKDDTSSSREEKQILMRALSSPPFGNYHVWWSLADTKYAGTALLVXKCLRPLKVSFSLDGTVSKHEPDG

SEQ ID NO: 116598 - protein, 171 aa, Gossypium hirsutum
  Clone ID: AW186852.1.pep
MANFDAPSFSLGLDFDADLEPQLPAEDHLEPIFAPNPSASFNIIEENADEFESEQVMDSDSDPDTRPDPPRVLKRLRRAADESSATKKESEKTLVWDNGDDDIEEFSSSQEKNADVDSSTQYHSVCSSSKIPLKRLGLLTTQSSSQSSSRKAGQASVASASASLKASHDGL

SEQ ID NO: 116599 - protein, 93 aa, Gossypium hirsutum
  Clone ID: AW186835.1.pep
MGAQKSIHAGKAKIDVNVDFTHKICASMMLPSLRNTGSPLSLVIGSLCIKHPNLFGGSEKLDVSWDKGLYDSNILVAYRRPRPQWVAQQCFVI

SEQ ID NO: 116600 - protein, 121 aa, Gossypium hirsutum
  unsure (1)..(121): unsure at all Xaa locations
  Clone ID: AW186834.1.pep
MSIATCFSSPSFSPLHKSISIPKISTTFPLHLRISSFSTTNTTTTLRYRQPSPFLTFSALPGGNGGDINNSDGGGGNDDNGKGNGGGGGGXGGEDAGDKNRKEAMVVLAETGKSMESLPKD

SEQ ID NO: 116601 - protein, 63 aa, Gossypium hirsutum
  Clone ID: AW186833.1.pep
FRVVLPPSGIRQLKKLFSISLFVRMNQIFYITIIFTFVRVYAKFESMVSRVWFCFKMSNVLIF

SEQ ID NO: 116602 - protein, 108 aa, Gossypium hirsutum
  unsure (1)..(108): unsure at all Xaa locations
  Clone ID: AW186830.1.pep
VILVSRESAYYRECETGSEEYCPXSVDPVLLISYGRSPYSREPSPLGDICCYRDLSLLYHQPREDVTLLSXQLGVCRRCPCISLTTTSAPMPLIGLTFVMSSAAPPQL

SEQ ID NO: 116603 - protein, 80 aa, Gossypium hirsutum
  Clone ID: AW186828.1.pep
GERNANTYPILSSEIPNKYLHNIRWTSVQTVGTKIESVRRMYCHTRFQHDSLPGLSQIICTIQGCVRGSVDPDRQRCSNH

SEQ ID NO: 116604 - protein, 163 aa, Gossypium hirsutum
  unsure (1)..(163): unsure at all Xaa locations
  Clone ID: AW186827.1.pep
MLIYLSFPGKRNFRDGDLRDKLDRRLSPKRRYSPARYVRDQQISQRYSPLRSIDKKRNRKKKECLDGQSDFPETLKIPNVMEDLVIEGRRTSSTSKSILEDQLXEVRVDIDMLINRKHELETXVEEKVXEAETLTSQIEELDSQLEREKETCLXITSRIKKFV

SEQ ID NO: 116605 - protein, 81 aa, Gossypium hirsutum
  Clone ID: AW186823.1.pep
PLGPCRKYLPYLTSLRDVFVAHLACSNPFEHSMRILSHSKTKYNLACLHNVASSSTHILETTLVSCIIQHILSKTEASLMQ

SEQ ID NO: 116606 - protein, 64 aa, Gossypium hirsutum
  Clone ID: AW186821.1.pep
WFFFFFFFFFFFFFSVSCFCDFFEFSASSVTDFRYNYLSSKQSKRESRWVLRILKNGWSWFIGD

SEQ ID NO: 116607 - protein, 175 aa, Gossypium hirsutum
  unsure (1)..(175): unsure at all Xaa locations
  Clone ID: AW186820.1.pep
MTSNPTLLPEIGPDGLAREPSVIAYTEKIIEEERLQLTKYIAENYSKIHDIERELANLTVEMKLTAGPKKAALEHMRKKIXMXTERIRIAKEKEEQARKAWESASKALHDEEAIKQRLCEDLNNLVHESSNSQFARLEELXRRLEALNPSKXSTSDHDMKAIGLTQHAATIGVFS

SEQ ID NO: 116608 - protein, 65 aa, Gossypium hirsutum
  Clone ID: AW186804.1.pep
LYNEYLIMYKNYCQCYYEFYRVIYSHRSAKAFPIPTLSGVCAPTCMDPMIEAAAAPYRHSAPSIQ

SEQ ID NO: 116609 - protein, 100 aa, Gossypium hirsutum
  unsure (1)..(100): unsure at all Xaa locations
  Clone ID: AW186770.1.pep
RNAISRNIVDLDHHIFWGAQHPDMNFSVNSLPGNSFHDLRGISRDHYEFXAPEDEFYPXCSLNPHSSPXTVSFSNHLGHLPPDLDLSKVXHLDPICVKLA

SEQ ID NO: 116610 - protein, 67 aa, Gossypium hirsutum
  unsure (1)..(67): unsure at all Xaa locations
  Clone ID: AW186767.1.pep
ADYPKSSKLLSMMTSMIPDIRLRVGFDGRLGAVRLAYFLSYAIVSNLTATAVFTLTAGKRTVHPNSX

SEQ ID NO: 116611 - protein, 98 aa, Gossypium hirsutum
  Clone ID: AW186766.1.pep
LLFKYFPSLLFSISRPPFLSFLSSDTPLLLTFLSPFLTTVFSFLFKYFPSLLFSFFQPPFLSFLSSHTQIRYTRVSGFLIQRGAVTFHWGLGFSDSNN

SEQ ID NO: 116612 - protein, 225 aa, Gossypium hirsutum
  unsure (1)..(225): unsure at all Xaa locations
  Clone ID: AW186765.1.pep
VERSSGGSQLDGGCSGTKHVFEKVIVGHSPRRTRHSRRFSIDSYNSFLAKETASEFTIDSPRFHIGSPRFNASHKKMEFISRMDEISSSKRMDNASEVEDDTSDRVYTIDPVHNGAVYNETLDSKPGVGITDEYASTPREQINLPDACDPDIKKLYTRLQALEADRESMKQALLSMRTDKAQLVLLKEIAQHLSKXMPSNKXNVVAKPSILGNLPFMTVFKWILS

SEQ ID NO: 116613 - protein, 117 aa, Gossypium hirsutum
  unsure (1)..(117): unsure at all Xaa locations
  Clone ID: AW186758.1.pep
LLRKQATNPRMRMVVTRPSLPNPNMMEVLHQKFPQSQSKTLQRRPSPAGNPRFPHSKVTCKWCNLYYGTVINRSPVRMNIRTPITTVNXTNPIIRTEYRSXTHILILMLYAVVFSDK

SEQ ID NO: 116614 - protein, 48 aa, Gossypium hirsutum
  Clone ID: AW186757.1.pep
RGKTTEKNGGKKLKIFFPFFPNSELKALLIQGFNFSLMEAKNKIGKCL

SEQ ID NO: 116615 - protein, 54 aa, Gossypium hirsutum
  Clone ID: AW186753.1.pep
NPFLFKPCFHGDRSSSSLILSKISFGGKQVFFFLKTFQCFIDTSLPVSLKKKKK

SEQ ID NO: 116616 - protein, 214 aa, Gossypium hirsutum
  Clone ID: AW186747.1.pep
IIYSLEHKMLNRGVQVFSAKGQEAIDTALKADLVVLNTAVAGKWLDAVLKEHVADVLPKVLWWIHEMRGHYFKLEYVKHLPLVGGAMIDSHTTANYWKNRTRERLGIKMPETYVVHLGNSKELMEVAENRVAKRVLCEHVRESLGVKNEDLVFALINSVSRGKGQDLFLRSFHESLKLIQERKLKVPPIHAVIVGSDMNAQTKFETELRNFVSH

SEQ ID NO: 116617 - protein, 65 aa, Gossypium hirsutum
  Clone ID: AW186746.1.pep
LAAVSAIQGDLERAHHFVTQALSLVPNSSEATMTAIYVDLILGKSQEAVSKLKHCSHVRFLPSNQ

SEQ ID NO: 116618 - protein, 155 aa, Gossypium hirsutum
  Clone ID: AW186740.1.pep
MRRGSEANKVSDPPKVISADNGFEHAAKAVVNDSPRVRGEWGSKNGDNYNYQIMGSNLGNFGSMRKQKEWKRTLACKLFEERHSHNVAEGTEGMDLLWEAYETDSHSHNKVKMKSSSKKGKKSGNNKDYCYDNDNYDEEYEEESNGQLCCLQALK

SEQ ID NO: 116619 - protein, 120 aa, Gossypium hirsutum
  unsure (1)..(120): unsure at all Xaa locations
  Clone ID: AW186738.1.pep
MVKKDKEELSEEERKALRGSKFAPLPPPSLSKPRLAHPGGPLTTNKAAXLAKFLERKLQDPNGLSSINPQLLELAVNNAKATVFQSGASSSGTRVRHVNSFGDSEDSLEKSYFGISRPYK

SEQ ID NO: 116620 - protein, 114 aa, Gossypium hirsutum
  Clone ID: AW186737.1.pep
MSADHGLLQDLSQTKLPKLKIQSSNQTGNENTNPDDSSSSSKECCVTPTSKEHKIPAVLSCPGAPKKPRKTHVSCKRKLSSKFQFFDIINREEVDAFFNTGFDHSISKRRCPPT

SEQ ID NO: 116621 - protein, 152 aa, Gossypium hirsutum
  Clone ID: AW186736.1.pep
VLLIIAFAAIIRIEQKNPSNSLVFARVYIDFLATLVLLMGVAFGCYGFLLFSKLRRVRSEKASSEMRKVVGLAVVSVLCFTSSSLIALFTDVLLFHHWNPEKINGVKAPILLILHHVLGSSVPFAFGLWFMRELPAPSTSNRQVQPKTNTFN

SEQ ID NO: 116622 - protein, 249 aa, Gossypium hirsutum
  unsure (1)..(249): unsure at all Xaa locations
  Clone ID: AW186733.1.pep
MSSKPGERTFSNYSSGFPSVPGPSAWAFGSSEFSFDAKSSTSHMPLQSVTNDTSSRKSCPSFLDSLNVSKASFGSLFQHNQPTKDAFPSHSSQFNSMNAIRSSPLDKPSMESETMGTFSKQRSLVFPIASEFPXHFAVPAKSNGDLLRLNENISKKKHEFYSAXQNEEFAALXEHLIEDLTQEKFSLQRALEGSRMLXKSLAAENSSLTDSYNQQRSVVNQLKYDMEKLQEEIRXPLAELDSLKNGYTK

SEQ ID NO: 116623 - protein, 102 aa, Gossypium hirsutum
  Clone ID: AW186700.1.pep
MEFSDYTQILFNRIKKIDPENVSKIIRYLLLQHYGDQDIVQLATCPDILMHEVIYKSKLELQQLLFKSASPPISPSMNSVSTLELPSEFSFLFTTCLPICLL

SEQ ID NO: 116624 - protein, 101 aa, Gossypium hirsutum
  Clone ID: AW186692.1.pep
IFRTRLVLFLIPIFCCFSLKTLETETSKRLFLVYSLFSSKAVLLFLISICLPPQQLKIKCFNFPSLPILFCIFKFTPISFYFQPIILEPLKSEENACLNTT

SEQ ID NO: 116625 - protein, 192 aa, Gossypium hirsutum
  Clone ID: AW186690.1.pep
EAEAEGDKDGEIRNLGMAEDFDAQVDLPEYDYPQLKCNMNENPGDDAEDVEKYAFGETPHARDQLRNLEQRIFQVERSSGGSQLDGGCSGTKHVFEKVIVGHSPRRTRHSRRFSIDSYNSLLAKETASEFTIDSPRFHIGSPRFNASHKKMEFISRMDEISSSKRMDNASEVGDDTSDRVYAIDPVHNGAVY

SEQ ID NO: 116626 - protein, 193 aa, Gossypium hirsutum
  Clone ID: AW186689.1.pep
RKGEAHHLEDGPFLKPSSASNPPWELPWKFRSITNGFNDEIADIMSAVEAKDGGPDQANEKLVRRRQKSEADLTARTPERLLKEDSTNGGGYSTIIAKGLALRTKAVNRTKSGAGAEFAGFNPMPTGLGDGFVVAGFSQVRKSLSTSSWQDQDHSSSSLSSVWPAASKWSLKPDLQGVSTVGDTIAIFDGLPN

SEQ ID NO: 116627 - protein, 148 aa, Gossypium hirsutum
  unsure (1)..(148): unsure at all Xaa locations
  Clone ID: AW186688.1.pep
TLLLKIGLEARRTSRPLIPLSNGTLTPPRARPPPSLPAPPPTPPTPPPAPSPPFCPAPPRSPPXPPLLPPXPPSPPSPSAPPHPPPPSRWHPPPPSPPPXPPRPGPPPSGPFLRSGFIPPPPHPLPPFSALSLSVYSQIPKATKCYFT

SEQ ID NO: 116628 - protein, 142 aa, Gossypium hirsutum
  unsure (1)..(142): unsure at all Xaa locations
  Clone ID: AW186686.1.pep
MGSDDWGSCSDNEVYLQDRNEDDDEEDCYSSGFLSKLQFRKDISKARWVDDLAMAEVVEKKGKMWVTMGIVRNGNTYCFIEETLFLIEIGALHVLDGNDIHLSLKELYEKLSNGKSGCYWELFEVYKPLKSLGYVXGAHGIP

SEQ ID NO: 116629 - protein, 97 aa, Gossypium hirsutum
  unsure (1)..(97): unsure at all Xaa locations
  Clone ID: AW186681.1.pep
VHTVGKEYGHRTVEATAERMRVLGEMVRVLKXPGGMGVLWDLLQXPDNVRRLQELKMEDIRVSERVTAFMVSSHMVSFRKPSQHVVGPGEVRLDWRC

SEQ ID NO: 116630 - protein, 59 aa, Gossypium hirsutum
  Clone ID: AW186665.1.pep
CHHLLWFFHGIVVVISELWCMYHFILFSIAFWLKCSRVSIFLAEYDGVGAAAEFTKICW

SEQ ID NO: 116631 - protein, 82 aa, Gossypium hirsutum
  unsure (1)..(82): unsure at all Xaa locations
  Clone ID: AW186664.1.pep
MYGRGGLDKFKKAQSLEPFSVSLNSSSPKTAPKAGQVEQHSHIQNAVAQPQQEDDVQSKPXTQVGAGQSTWPPPDWAIEPPP

SEQ ID NO: 116632 - protein, 204 aa, Gossypium hirsutum
  unsure (1)..(204): unsure at all Xaa locations
  Clone ID: AW186660.1.pep
ISLAYLSVFCTCCVFGWNMERLGFGNMYVHIATFLLFCMAPFWIFNLAAVNIDNETVREALGFTGIVLCLFGLLYGGFWRIQMRKRFNLPAYEFCFGHPAVGDCTLWLCCCWCALAQEARTGNSYDIVEDKFLRKQTNNGNEVRMSPLPREQGIVRFSSDPISLLGYGCXPTTKFTTNSPSXKMISKEYYXPDRQLSTVKENVP

SEQ ID NO: 116633 - protein, 64 aa, Gossypium hirsutum
  Clone ID: AW186652.1.pep
FFFFFFTFWRSAFCLILTPFLASPDSLPRAASFEYRPHTISRLPIFLQKFPGGIVIPSRTALAL

SEQ ID NO: 116634 - protein, 206 aa, Gossypium hirsutum
  Clone ID: AW186651.1.pep
GNQELNDELNELEKLFAEHKLRVPPDHFSSARRSKPADVQIEPEPSPACKKPAAVDVSPVHMPDKNLISEPMGSLSNMAVFCTPSTKMVDNQDFSGSLRRSFSGNSFSDDSRGKFYEKYMQKRDAKLMEEWGSKRAEKEAKLKAMQDILERSKAEMKAKFSGSAERQDSLSNARRRAEKVRSFNFRSQRGQVSPIFRFSGNKCQNS

SEQ ID NO: 116635 - protein, 95 aa, Gossypium hirsutum
  unsure (1)..(95): unsure at all Xaa locations
  Clone ID: AW186647.1.pep
MMHRSNLSSASSSDDKFTVMELVSSVAGNMPCSSQPISSTQKNTQPEKRTNEHNPTIEKPAVTSPPVFDDVIHVIRHXXFRVGSEQQGMXKAEPD

SEQ ID NO: 116636 - protein, 100 aa, Gossypium hirsutum
  unsure (1)..(100): unsure at all Xaa locations
  Clone ID: AW186646.1.pep
MAIKFLDWYLKIAIGSAIIGGSMELFMIKTGFXSWIRYLTRSRKHKGSTMASKWLYKPLDDKVTVLESEKRAWENSPEAQAMREALNPWRNHDAQERKSS

SEQ ID NO: 116637 - protein, 230 aa, Gossypium hirsutum
  Clone ID: AW186645.1.pep
ELSLSPADHFSKRKIMPIEPISKPQSPIALLKSAQRFRVFTPKKSKSMANTGNNTRLPEKTKLVGVSMETPKHGNHNSREHFTRENSFRRTKGKIEDDPSKRLSKDLVHKYLNVIKPLYTKISKKHSQTHKFEVSGDLSTLSPATSPATVYSVKEKQGNTNIKAGYKHLGKSRSASAAASPISRRDDSLLLQHDGIQSAILHCKRSFNSSRESSWLSRCTSDCSSQEKLS

SEQ ID NO: 116638 - protein, 113 aa, Gossypium hirsutum
  unsure (1)..(113): unsure at all Xaa locations
  Clone ID: AW186637.1.pep
YVIKIISKIDLRSGYNXHRNSLRAAYRDRDLTRLFDLLMYTDPLKPTTHDAASTPYKIPSSFQPVIPPSRPIFFSLPFATMYPRLLSLASTGERSGRNLGRVSWRQMSMEMPP

SEQ ID NO: 116639 - protein, 149 aa, Gossypium hirsutum
  unsure (1)..(149): unsure at all Xaa locations
  Clone ID: AW186720.1.pep
MSLISGSYXRFIWGFKMKPLTHRPPFSSSTILPXFSYPSQIDPXITIVTVAGPSSASGSSNNTIHIYYISSTSSLGPLYHFTSSITSISFKXRPKISFPLNLLSTSSYDNISILDTDTFVLLKSFRSQKKCILYLDVLPSGKITFSFSP

SEQ ID NO: 116640 - protein, 74 aa, Gossypium hirsutum
  Clone ID: AW186715.1.pep
NLQVRKQIHEIRNKIEAKSKYPTDMLDSGLIELSLSPFHFFSKKQETFTDTTIPIPFIQSSKGSNVFPPYYQSP

SEQ ID NO: 116641 - protein, 103 aa, Gossypium hirsutum
  Clone ID: AW186713.1.pep
CIYRETDERRSHCHGFNIAVVYLLSGGPHGSPRFQPSKSPQLSSPAPLRLFSAPPWLRLPSGTADSLISNWFSSIHAFFDVKFLGLIDRSGRMRANALLHRSH

SEQ ID NO: 116642 - protein, 49 aa, Gossypium hirsutum
  Clone ID: AW186712.1.pep
FFFFFLEKTDTPRNWLKKSSILNNGCTCPNMPGPKPINGPNFAKPKYHI

SEQ ID NO: 116643 - protein, 71 aa, Gossypium hirsutum
  unsure (1)..(71): unsure at all Xaa locations
  Clone ID: AF056964.1.pep
VLEPNIENDDNIDNAEKLSVVHNGLHFAQLARVSPCSLKELNAQNFYDCVEQNTNSXPDININEEDFNQQS

SEQ ID NO: 116644 - protein, 83 aa, Gossypium hirsutum
  unsure (1)..(83): unsure at all Xaa locations
  Clone ID: AF056963.1.pep
TRLGEDIIISCAFRILNHGRRARTRVRDSIIISLXXXIXISVXATWLDGGGCESWPPQDDAXLXFTXFYXRFAWSIAXSAVQX

SEQ ID NO: 116645 - protein, 77 aa, Gossypium hirsutum
  unsure (1)..(77): unsure at all Xaa locations
  Clone ID: AF056962.1.pep
ELEREIERDLXEEIKDXIYXLXFRLHRLYQHKRERXADDISESGHKXKDXTLSEVNICIKMEGGNQDRDKRDKERSS

SEQ ID NO: 116646 - protein, 43 aa, Gossypium hirsutum
  Clone ID: AF056961.1.pep
QLFCYTDFDGSNHHTSEMKISGTHYLDFLLLILLTKNFIMFKL

SEQ ID NO: 116647 - protein, 91 aa, Gossypium hirsutum
  unsure (1)..(91): unsure at all Xaa locations
  Clone ID: AF056960.1.pep
LFXXXXXQMAWXDXLCXIMAXLXXXLLFMXGKYCYLXEXVFXXIIXCXGIVAXTHXRXXCTLCSXXCCSXCLFMCFXCXXPXXCFGXXMXX

SEQ ID NO: 116648 - protein, 71 aa, Gossypium hirsutum
  unsure (1)..(71): unsure at all Xaa locations
  Clone ID: AF056959.1.pep
SLNLVSLNLSLNLSLNKKTKYEVAEVRTPLRRVWKETAKRGLIVLDSREESKEERNYCEFHDKVXQKKKKK

SEQ ID NO: 116649 - protein, 84 aa, Gossypium hirsutum
  Clone ID: AF056956.1.pep
LIHGANKGKSRVSDSVKSRKGNGSKRRGDESKSVSKSKVKEKCSNEEIVARGGKSPVTVGAAGNQISDDNEHLNTGNILNLQHG

SEQ ID NO: 116650 - protein, 174 aa, Gossypium hirsutum
  unsure (1)..(174): unsure at all Xaa locations
  Clone ID: AF056955.1.pep
VSVTSIRKGSRGGPAGTKVNKEHKTEKEFARGNRMKDIGNRKKDIGNRKKDIGNRKHDVXLRHCYQSLYRPTLVSQIGMRRDVHRKIGSEAVADRGPCVKVEPRTRPHXQTILNQKCEIRFVRSMYRTHRKVXSRTSLGPXXKPCCPSSGSKLPTXFXILGSEVXRGXGRXXVR

SEQ ID NO: 116651 - protein, 47 aa, Gossypium hirsutum
  unsure (1)..(47): unsure at all Xaa locations
  Clone ID: AF056952.1.pep
VVDHPSTANHPPRVPTPNLGLLLRKIQXDXLLTLHQYKDPVLLLVQA

SEQ ID NO: 116652 - protein, 55 aa, Gossypium hirsutum
  unsure (1)..(55): unsure at all Xaa locations
  Clone ID: AF056949.1.pep
ERYIVFKEGAVYNHDGSAPLSKLSDKPKYXRLGXRLPHLEWNLLKNLQIFPXVQA

SEQ ID NO: 116653 - protein, 84 aa, Gossypium hirsutum
  Clone ID: AF056948.1.pep
AARERRDVRERFAFKTKSEVEILDDGYRWRKYGKKWVKNSPNPRNYYRCSIDGCPVKKRVERDKEDPSYVITTYEGIHNHRSVS

SEQ ID NO: 116654 - protein, 106 aa, Gossypium hirsutum
  unsure (1)..(106): unsure at all Xaa locations
  Clone ID: AF056946.1.pep
AARDXMNLVPYKYIVCRQGTPGMDEALGVKPEYPRTSMLVVSEFIGCSPSLSGAIRVNPWDIDAVAEALNTAITIPESEKQLRHEKHYRYVSTHDVAYWARSLGKK

SEQ ID NO: 116655 - protein, 107 aa, Gossypium hirsutum
  unsure (1)..(107): unsure at all Xaa locations
  Clone ID: AF056944.1.pep
CVLTAKGAAETLKFNMALILMPVCRNTITWLRSTKLGLFVPFDDNINFHKXTRWFXRNLIKLPKPFDRITGFNXFWXXHHLFVIVYVXXIIHGXFLYLXHIWYRRTP

SEQ ID NO: 116656 - protein, 69 aa, Gossypium hirsutum
  Clone ID: AA660000.1.pep
RSLTSQRSSIQPRNLKFTGACPFSNGFCPGRTLYYRSVTPLRTKLILYTYVKFRQRVGTLRLFSLEIAA

SEQ ID NO: 116657 - protein, 70 aa, Gossypium hirsutum
  Clone ID: AA659997.1.pep
LTPKLDAEKQESFKKNIEGATKFLISKLKDLQFFRESMHDDGCFLFAYYKDGPVDPTFLYFAYALKEVKC

SEQ ID NO: 116658 - protein, 60 aa, Gossypium hirsutum
  Clone ID: AA659996.1.pep
LSTKSPLVCDVKGSNRMSGSSHFTGPLSARYSCSQKVSSERHMSAARQLQATAPPTRANI

SEQ ID NO: 116659 - protein, 155 aa, Gossypium hirsutum
  Clone ID: AA659992.1.pep
RCRADEELERELGEHEKSLTAFASRNFDPMFQKSIGNMIRRRERRCLRFQQCKAPYWRLKNFANAALYLASDDAKFISGVNLPVDGGDSLSNQSWKMGFAALWNKSRKSSTLLFQHLFLNKERNGEIKPCNKLDHWNLINPYLLVVQMSKLISFF

SEQ ID NO: 116660 - protein, 60 aa, Gossypium hirsutum
  unsure (1)..(60): unsure at all Xaa locations
  Clone ID: AA659990.1.pep
NVQLFPKLNPMNPGIYAIPIILSSSLIKVILXPSSSLIPNRSKRFRLRLSCKDVLCSEFQ

SEQ ID NO: 116661 - protein, 107 aa, Gossypium hirsutum
  Clone ID: AA659984.1.pep
KPSLCYRNAWLCTHSLWGYTLQPSQETKQMRHHPGNAIHILCFLYREDSNNVERGRYLGPYGIAYDAMDFAPRIQSFVYPPSLGSWLFFRIGSSCRILVKKIINSNK

SEQ ID NO: 116662 - protein, 75 aa, Gossypium hirsutum
  Clone ID: AA659969.1.pep
GKPGLDAVSHGESTERGKCFVLIPEGNDYLHALSKLAHWLPLHSGFVGKKRCCFHYCCYCITVETCGYRNGNAYL

SEQ ID NO: 116663 - protein, 101 aa, Gossypium hirsutum
  Clone ID: AA659967.1.pep
QGNSLLFHGENHPFSGPQGLSQRPFKIILHPNPQRLKDSKPGNPNPAQLGSRFIYFPTLPNPPLFLPSGQPFGIARLRPGFPSRPPWVPALFPVGMLLLCS

SEQ ID NO: 116664 - protein, 80 aa, Gossypium hirsutum
  Clone ID: AA659966.1.pep
SFWLVLVTWLICLRPQLLYSLFCLCDSVTLTLLSLMLSCEHLPADACLDCCYYALLDAKPLGHYLKYPLNWAHENLVFHF

SEQ ID NO: 116665 - protein, 95 aa, Gossypium hirsutum
  Clone ID: AA659965.1.pep
MKKNKQKNGKTEQRNPKKKKPTHRPPEPRHPPANPQPFRFHFKSQVQLRQSKDEANQGRSSRVTHLYLLKSNPHDQAILKPKKRETTNENDGRHP

SEQ ID NO: 116666 - protein, 72 aa, Gossypium hirsutum
  Clone ID: AA659964.1.pep
RREIHSGKMLKVNRQQKVAAPDPFGTEWVELGGTSGRGKSGRAFNSFLRAWQAGTLCQRGTLTVNRLNISQL

SEQ ID NO: 116667 - protein, 75 aa, Gossypium hirsutum
  Clone ID: AA659961.1.pep
FQTKRQQSIIYFFKILTTTVKTITKVTIELSSKIPLDKRENLLPTKLAYIIFTTKLLLPKTERDIIYWTFAGSIP

SEQ ID NO: 116668 - protein, 75 aa, Gossypium hirsutum
  Clone ID: AW187953.2.pep
FFFFFFFFFFFFFFFFFFFFIKTKLWFLMFFFLRCPNGNDLGMRCPLISVLFLACLVLFCSNFHCPFNYKKLLFF

SEQ ID NO: 116669 - protein, 30 aa, Gossypium hirsutum
  Clone ID: AW187884.2.pep
LGCSFCTHYLVNNLHVDLDLINTLSFHVST

SEQ ID NO: 116670 - protein, 79 aa, Gossypium hirsutum
  Clone ID: AW187545.2.pep
FFFFFFFFFFFFFFFFFFFFFFFFFFFFFFFFFFFFKKEKKTPKKNFPFFIFYFNQILKTPKENSKKTPPPFFLFGSHL

SEQ ID NO: 116671 - protein, 96 aa, Gossypium hirsutum
  unsure (1)..(96): unsure at all Xaa locations
  Clone ID: AW187486.2.pep
KFGSDVMYDLIYASAVXLHMPDKLVWVGLERLVSRLKPYDGRIFVSHNIKFCSRLGGDECTKRLGSLGIEYLGKHTHDSLLFNHYEIWFEFRRSKA

SEQ ID NO: 116672 - protein, 132 aa, Gossypium hirsutum
  unsure (1)..(132): unsure at all Xaa locations
  Clone ID: AW187444.2.pep
SPLPLLISLDPFVNTVSSNNSTTHSLINVPVSDSPIPSISGTIILTSSHHIRSINTYISSFHSLHPCISHRLLLCSLIHLAYIRLNLFVYDMHTHSISLPLSQIIFRICVQDRGLMEFFIHKVPPILLXASG

SEQ ID NO: 116673 - protein, 72 aa, Gossypium hirsutum
  Clone ID: AW187441.2.pep
KKKHTHSRTRYNTPILPQSTKGQTHTFQTPCQSQKQMCPHHTHDSKKSHTLAVKPFSHITALVMSAGFRLSN

SEQ ID NO: 116674 - protein, 63 aa, Gossypium hirsutum
  Clone ID: AW187438.2.pep
HTEIDSMKVPSAVRLCIGEPSEKLSYPIQASGTGRVYKHQSLWSSYHRGRGEASSKLTVKALP

SEQ ID NO: 116675 - protein, 73 aa, Gossypium hirsutum
  Clone ID: AW187437.2.pep
RLAGATKSMPRPACSPFRISKQNSFPARIFRSPVEMSCCVETLLPYHTATASALLTSMLSVSRRRSNWTAEDG

SEQ ID NO: 116676 - protein, 62 aa, Gossypium hirsutum
  Clone ID: AW187434.2.pep
CSNDNKKLTKKPGNFAAIMSICSPPCLLFLFSFFFPLYSGRILSPVTYLYADFCHQGVSFLP

SEQ ID NO: 116677 - protein, 86 aa, Gossypium hirsutum
  unsure (1)..(86): unsure at all Xaa locations
  Clone ID: AW187433.2.pep
NEDLKLELVKMKMRLKEIERPSSXVPSAASSPMGIIVPSFDNPPLPRKSFMNSVFKKLGRLYPFGVPPSGAKARTRPSKDRRHSIS

SEQ ID NO: 116678 - protein, 56 aa, Gossypium hirsutum
  Clone ID: AW187431.2.pep
FFFFFFFFFFFFFFFFFFFFFFFFFFFFFFFFFFFFFFFFLRKKRGTSNLHAKARG

SEQ ID NO: 116679 - protein, 69 aa, Gossypium hirsutum
  Clone ID: AW187430.2.pep
FFFFFFFFFFFFFFFFFFKRIRILNEVLSKDFDSILPFVQNRIDHFHPFPKSIHPLHFPYSQNFLNSNC

SEQ ID NO: 116680 - protein, 101 aa, Gossypium hirsutum
  Clone ID: AW187355.2.pep
RREAKRIPVLVASLSVIFGLAVVFISGFFIWRRRNSRDKENSQEVQLLDLEKNKNKPWLLEDETGQAQYQGQLEGSQSANYYLLMMQGKEFVAITAGFWYE

SEQ ID NO: 116681 - protein, 70 aa, Gossypium hirsutum
  Clone ID: AW187189.2.pep
SASSDEKELALVTESSFSVSGYNIRSVSEDDREQLRKFVIVVLKHDLKLDHIRVGDHFVFEGDLNKLWVA

SEQ ID NO: 116682 - protein, 124 aa, Gossypium hirsutum
  unsure (1)..(124): unsure at all Xaa locations
  Clone ID: AW187099.2.pep
LAKNYGNYQISIASHPLXXPXGIFRLLPTWSISRQLLGEGGGNNRSKADVRKSTSKSASSWGGQDSHPPPFSQFSNTGPSTVVSYSRQVSNSPTGTGWNCKTTPTSNGYVKSCSKTTYQSYTRP

SEQ ID NO: 116683 - protein, 88 aa, Gossypium hirsutum
  Clone ID: AW187058.2.pep
NKHMPIFQSFFPPCATAKTNWSRSSSRTTQASSMILIPCIQYYVTLGWVPYLCYKLKKPISTIIIIKMLFLPLKKKKKKKKKKKKNKN

SEQ ID NO: 116684 - protein, 112 aa, Gossypium hirsutum
  Clone ID: AW186851.2.pep
SNPTIILLFPHPCSKKIELNAPRKESWVTEELPNLRKTQLSFPHLLKLSEFLQITTFDVHKGSPLTPPSLGLGQVYYSTICFLMFHYFHGPKLMGVLISPRVHPRDRSPPPA

SEQ ID NO: 116685 - protein, 95 aa, Gossypium hirsutum
  Clone ID: AW186841.2.pep
EKPPSPYKVSYFNVIILFLSSVRYQSHSNSNASPAPTSNAASTPSNTRERALLSACRNNKTKQNSIPEDHYLLPKTEYRHWYNRRLERQTSSDTS

SEQ ID NO: 116686 - protein, 130 aa, Gossypium hirsutum
  unsure (1)..(130): unsure at all Xaa locations
  Clone ID: AW186818.2.pep
NSTTHKGLEGYYHLVLVLXIGLCILTTLXGALFPNSFPVDLCSGIAITLQGLWFYQTAFTLYGLMMPDGCRLKDNAIHCLPDNEVRGQLIANFQLFSLVLGVLIAVVGLYNFAASRYGNSDFRSMQSVQN

SEQ ID NO: 116687 - protein, 93 aa, Gossypium hirsutum
  unsure (1)..(93): unsure at all Xaa locations
  Clone ID: AW186813.2.pep
NPIQTPNPNPQFQPKTLTFLKNPNHLKVSTAARLPRAQNATSVLYAPPLCHLRNVLNHEPANKRQRSSKEVFVFPFGGVELVSXANWARRISD

SEQ ID NO: 116688 - protein, 112 aa, Gossypium hirsutum
  Clone ID: AW186806.2.pep
GGSWFLKLLLLSMLFILSFSQDITLFLFHVCCCCFVFLLFLSIFTLCFVFRCLGLSGKWMENHVEFREYNVQLEEFAERGKEMIEIMDYKEPGPNTNPRSSYIFGPPPQPQP

SEQ ID NO: 116689 - protein, 117 aa, Gossypium hirsutum
  Clone ID: AW186788.2.pep
KIQKPPFSYSFETHHRRHRRGTIVGSGWSHVKMGGFNLHLKRPKAMPSQPESSREESLPSLFGLDFDDGEGLQRTSPGRFRLKGKVNKRGFRFGARGQEEPSLRRWTCRRGTWGVRR

SEQ ID NO: 116690 - protein, 75 aa, Gossypium hirsutum
  Clone ID: AW186781.2.pep
LRGGVILSFWNTTKVVKMISFHYIYTHIHIPSNAWILEARHLMNHRCFVLIVETRIHHILCRSDSIICLAFFCHL

SEQ ID NO: 116691 - protein, 66 aa, Gossypium hirsutum
  unsure (1)..(66): unsure at all Xaa locations
  Clone ID: AW186774.2.pep
MHFAKLDDSPMFRKQIQCMEESAELLRERSLRCFXGCRKYTEGIGEGYDGDIXFASALEMFGGRHN

SEQ ID NO: 116692 - protein, 36 aa, Gossypium hirsutum
  Clone ID: AW187976.1.pep
LIYFLLHQVLLKDYSEINTSLCELFAWPILSLVTML

SEQ ID NO: 116693 - protein, 58 aa, Gossypium hirsutum
  Clone ID: AW187941.1.pep
QTGRIVPCGPSPSPLALGPPHPQIDIDHLMFSFWVKVNVPKLGFLFYFIFQFDRFNYT

SEQ ID NO: 116694 - protein, 186 aa, Gossypium hirsutum
  unsure (1)..(186): unsure at all Xaa locations
  Clone ID: AW187923.1.pep
MPTNLNFEMARSLLGFTVLLLFLSICESASFFQPISDSHRSAAVELFSPDHGSLKSLEETYEALRTFDVLGIEKKPDVTATACRLVSETVGSSSSTLKNVFYALKANTIVKCKINDXAYQGIITRLNAAVDGASSLPDFYYSVGGLVLVKGSKGDVHLADADGIFRSFQAFRHSDGRWRSTSTNPE

SEQ ID NO: 116695 - protein, 94 aa, Gossypium hirsutum
  unsure (1)..(94): unsure at all Xaa locations
  Clone ID: AW187921.1.pep
IFPLKLKDAKGVDTSYPHRKLTLFHTLPVDATAAITLAAGGEWLIETLDVLFGKRDVYPXAVVLPNRSAGDAFVWYXKLFSYLYRFATVWLDTM

SEQ ID NO: 116696 - protein, 59 aa, Gossypium hirsutum
  unsure (1)..(59): unsure at all Xaa locations
  Clone ID: AW187894.1.pep
ASGRAEVFSVTVCXKSTQIARSELSLGSHAEEFSISIFSNFIFQKLTHIARGELSLGAR

SEQ ID NO: 116697 - protein, 53 aa, Gossypium hirsutum
  Clone ID: AW187887.1.pep
FSCIVYTKHGCTEVMHDEFDAELLKGKKEEDTRQYLTLLLETFFTYFLFKNDL

SEQ ID NO: 116698 - protein, 64 aa, Gossypium hirsutum
  Clone ID: AW187858.1.pep
YHHNAIFKSNNNFLEIMLTTTYWSSFQGQQFIAKRKRSFFWRRTWESQALSSSFFHVLVYWGFF

SEQ ID NO: 116699 - protein, 119 aa, Gossypium hirsutum
  Clone ID: AW187852.1.pep
NLVLVLESMINNAPHENKSGSRPLGRRVMRLHIPDLPISRHQEIATENRSLQTRQNQAHPLDKEDWCLMQIESMPSMTSFTFNRSIAICLGCVSEGMPFLYTQLLIIICYLDCRFRVGK

SEQ ID NO: 116700 - protein, 71 aa, Gossypium hirsutum
  unsure (1)..(71): unsure at all Xaa locations
  Clone ID: AW187841.1.pep
VPVRHELRQGKSIRRAESKALTRRGXERPVLPFTTTEELSTKEEADKRARFVQRKSDPPSXFEEALVGQLS

SEQ ID NO: 116701 - protein, 104 aa, Gossypium hirsutum
  Clone ID: AW187840.1.pep
STGRCDNSEARQNERRGVRLRQGPNAVEPDSKASDRERKETERGEKAERRKTSDNWRVGLRNHGQGGWQQPKPAKHGTSTEGVAFGKERRTRVRIVSTDRCQVS

SEQ ID NO: 116702 - protein, 35 aa, Gossypium hirsutum
  Clone ID: AW187837.1.pep
SPTYEKCTVIIFAKNAVLMKNNNYKTNVVGNFFSQ

SEQ ID NO: 116703 - protein, 60 aa, Gossypium hirsutum
  Clone ID: AW187833.1.pep
MASASEIAAKLNLVPNPEGGLYTETFRDISIFLSKSQLPPHYKVDRPVSTCIYFMLQSGN

SEQ ID NO: 116704 - protein, 41 aa, Gossypium hirsutum
  Clone ID: AW187832.1.pep
WSIQVRACINKASGLKRKKEGRQSIYGGGCPGRGTITLNQV

SEQ ID NO: 116705 - protein, 42 aa, Gossypium hirsutum
  unsure (1)..(42): unsure at all Xaa locations
  Clone ID: AW187830.1.pep
ANDIQSXXLLPNKFLNLEVTWIGGIFHLXSYIYCTKKKKKKK

SEQ ID NO: 116706 - protein, 147 aa, Gossypium hirsutum
  unsure (1)..(147): unsure at all Xaa locations
  Clone ID: AW187820.1.pep
MGETPVFYVENLKDRVSNGFNLRFKGFETSIDVGDKTFVIGSNNNDSISSIEVQIYDKSTGKWVIPTVFGTEPKRYEGHSAILLNEDRIMVITWGSTPNDCIWFLEMDTEYVXQQKKALGTEVIAWSKGVMGDAQKPXVIIGPSXVX

SEQ ID NO: 116707 - protein, 202 aa, Gossypium hirsutum
  unsure (1)..(202): unsure at all Xaa locations
  Clone ID: AW187806.1.pep
MAFGTKGDVYAIAAIAAAFATDQNGYDVAFITHSAHQNLSPHLAKXKIIFVPISSPPVLSSNGTDDKTGSPGLEFSEHKKIIAKEQRKECCLAVERLFGXWSLAKLFHVRCIVLAPYVVPYSAPSFFEHYFSKELPLLYKYLQDAPADKVCWKDVIHWMWPLFIDNWESWRSEDLNLSPYPFTEPVTGLPTWHDRTPSPLLF

SEQ ID NO: 116708 - protein, 51 aa, Gossypium hirsutum
  Clone ID: AW187801.1.pep
MQEKAHAALKEKNQKLLATLSIKMFTRFQQDFSQKKKKQSKENRKGLTPQC

SEQ ID NO: 116709 - protein, 45 aa, Gossypium hirsutum
  Clone ID: AW187790.1.pep
ELTKALVNPCLFVSNVGQRCASPRWLLMHCHSNCHRERRIYYINK

SEQ ID NO: 116710 - protein, 167 aa, Gossypium hirsutum
  unsure (1)..(167): unsure at all Xaa locations
  Clone ID: AW187784.1.pep
MFITLSAATAEVFHGIILLFTPDSISGLGTDSSSWGSPRRSPPLPLAVHPPFSFPASSPPGPPPIPLSPHSLPLVSPRATLPAPPATATPRVFLATPPPYLLLPPXPPLSPSPPTMALSPLALPPFSALSLLHPSSIPGVPLLRSPTPAGCPGSPXTPEPLISRSSA

SEQ ID NO: 116711 - protein, 134 aa, Gossypium hirsutum
  Clone ID: AW187781.1.pep
TPPSGHCCVAHGDRVAPTSIGPWFDLLMRIEVLARASHPSLRLACSVWSAPWFFECQPQRGMPSTRALLATNHSLASRSGSAFQVRYPNRLLCSTGSPAPSSILFTALLLGSLQLQPLAVIACFSGGSHPGWCG

SEQ ID NO: 116712 - protein, 171 aa, Gossypium hirsutum
  unsure (1)..(171): unsure at all Xaa locations
  Clone ID: AW187779.1.pep
AVKTWQATIGAREDGIMTAELLQRLFEEQEVKSSSSSNIATIWEKEGTNGTAITSLTEISEMQQKVVKEEGFTEAEVSQHRVFLLGENRWEEPSRLTGKDKQXTGSENINAKTSCHACRGEGRLMCAKCDGTGEPNVEPQFLKWVDEGANCPYCDGLGYTTCEVCQGRAVV

SEQ ID NO: 116713 - protein, 50 aa, Gossypium hirsutum
  Clone ID: AW187775.1.pep
LRPPRAILVHSDSILEPLSTLAQPPHKIEVGVDLFSPIGSKMTVFTYILH

SEQ ID NO: 116714 - protein, 115 aa, Gossypium hirsutum
  unsure (1)..(115): unsure at all Xaa locations
  Clone ID: AW187758.1.pep
DKMGKKGKWLSSLKKAFTPESKEKKTQKSKEQVLGKQVDLGSNDSDAATLETLNLSPPPQPQKVKLIETEAEPSEQTYPVEVAIAAAAAVALAAPXEAVADVVRRQSNTGPRFAG

SEQ ID NO: 116715 - protein, 174 aa, Gossypium hirsutum
  Clone ID: AW187752.1.pep
MAITTTRLTEMPLRTPLPFSSNSYSSSLNLFFSLPKPSFRFLTASSSLRSGINPGSISNRYSHPWYHRLSTGASCSCSSSLQAWSSPSEKVIQSDGNGKVDSETRYLNKGQSAINRIVLRLRNLGLGSDDEDEQDDGTDDYNSTPVTGEKRLGDLLKREWVRPDTRLIQKDKQD

SEQ ID NO: 116716 - protein, 92 aa, Gossypium hirsutum
  Clone ID: AW187751.1.pep
LISILDELRNLEVLNISHCLLIEIPPPPAPRRIMRELDQCVLDKASRLREFLTCMKDSCIMCQRTKNDEGLMRWYKYEEGVWKADEVSSLSL

SEQ ID NO: 116717 - protein, 173 aa, Gossypium hirsutum
  unsure (1)..(173): unsure at all Xaa locations
  Clone ID: AW187748.1.pep
VFFLKTYFLFYFYASNERKNPLSLYLYVCNKKTTGSLAEKQIPREKRKKEPPFEKKRINRSLIFVFFLCFNMSFLCIFTIWKSSLLYYNHFIYRKTKKNRKRKKQNLSFSLFSFFLFLLFAAVFFVLSIXWHLCFLLCCSFVAGTRSDGAYVRRKKPDGCGCWRLAIAARVSV

SEQ ID NO: 116718 - protein, 72 aa, Gossypium hirsutum
  Clone ID: AW187744.1.pep
HDKPAILSLLMLFFNVVCSLVICVPAVQFLLICVLAVCFLVICVFLLDFGILTLVRWLRIIWAINITGLSLV

SEQ ID NO: 116719 - protein, 136 aa, Gossypium hirsutum
  Clone ID: AW187772.1.pep
AIETPRVTQKPIQQSIHRSLPRFMSSTVASRERQSAAEKDIGTRARTFRPRARSSTQLSGFQSLSFSDNRFGSLLRHSVKNSRFKDTNGPATESPKCNDSSSLKTTSLSRSKVVTSSDPNLRVKLGHHKRRMSDFV

SEQ ID NO: 116720 - protein, 58 aa, Gossypium hirsutum
  Clone ID: AW187771.1.pep
KKLKILRSDAYVQYLHRSPSNITFHVFGGSYAIPTSGNVLNMDTLRKMKIKATQDDSF

SEQ ID NO: 116721 - protein, 184 aa, Gossypium hirsutum
  Clone ID: AW187743.1.pep
AEVQLRYSSALVQGATNVFWMDIQSNTRCFQSLFQYLLDEVTLESTRLKKIPIQAQRDLYLLLSRFIFFYNSVEKIESFLKQCPVFPNSFLIGGPADILVIELADQLQKLKVEPVLLHYLSQVKILRGMELRMATSTRLKTCLYSFTSPGGPMYPTRAVRHAAWDALNFLFPVGRLPRHLISLF

SEQ ID NO: 116722 - protein, 135 aa, Gossypium hirsutum
  unsure (1)..(135): unsure at all Xaa locations
  Clone ID: AW187742.1.pep
MAKGDDAVRRKKNKAQRKKLNRKSDSSTVSARVASIIAAKKRRKAGKRRICQGMCFXLPTPDDPFNERLDKKDISRREPQKPKPSKLDRKVSAKRKDSVATKGSVLGHNVALKDEQKKSVTLINNMGKSKHIDSG

SEQ ID NO: 116723 - protein, 83 aa, Gossypium hirsutum
  Clone ID: AW187734.1.pep
SLRLVSFVPTKSDYNIYYHIPPSYVHQGHSSKLFATKLLPRELEFPRQEYDLIRSPKLYKFFLTRLPSDNTAPPTPTAASSLS

SEQ ID NO: 116724 - protein, 68 aa, Gossypium hirsutum
  Clone ID: AW187731.1.pep
YFSYKEHKERERTEGKVILEVDARFLALNEEGIPVLQLQNQIWPSQITKYAVNVMTNSWFNERNLELP

SEQ ID NO: 116725 - protein, 128 aa, Gossypium hirsutum
  unsure (1)..(128): unsure at all Xaa locations
  Clone ID: AW187729.1.pep
SPKLYHPLKTLSNSWNMLVVPSPFIFIPNLKSICIAKTNKNQDKISVNQIYDMLYMMDRDDILVGLGGEAGSWNTIPYNQILMDIFCGKSVPLFFNGGLYFSFFQGFLXFNSPLSFNMMMTMAEGKGR

SEQ ID NO: 116726 - protein, 106 aa, Gossypium hirsutum
  unsure (1)..(106): unsure at all Xaa locations
  Clone ID: AW187728.1.pep
KLFIIHTIFFGNVKVLSWPFPLPDSRVSKENLIKNHETSNGWPLGLQIMNIRLGLQQRLQAAAPAVELYFLHIPSXSFSSFSSSNLDTESSASFFQDNSVSLGKLI

SEQ ID NO: 116727 - protein, 42 aa, Gossypium hirsutum
  Clone ID: AW187727.1.pep
RLNNYHCNHLRLKSYGGSTISVCTGTSTFTPYSPCGRWIVTK

SEQ ID NO: 116728 - protein, 188 aa, Gossypium hirsutum
  Clone ID: AW187725.1.pep
VLSVLLLKKAMQKKGKDLQRVGICQGIFNFIISSLVGFSLKRITLGHPMPRGSTNEAQEPLISQAKLDENPRIDDSGSAVRIHFKQTEEEELEDWNWTHVDKLGSSVHVADKDDGDDEAMEKRNKDIPRLNGVSLDTDEPQQVHGKTGRRVIIPITDSEGTKSAKALQSDAKKPMLTGLGFNINEISE

SEQ ID NO: 116729 - protein, 197 aa, Gossypium hirsutum
  unsure (1)..(197): unsure at all Xaa locations
  Clone ID: AW187724.1.pep
RFCEEVSENTYESSVLCLSREDRPXIHQYNGHEPVSRSIVDHDSDSSDSEIFRVKRRSFLKVEKRNGNHTMASNSSEHQGLKRLKKLQHEKRSGQSMPSDCSRNDEPNRNTNRASNYKESPENTLKDRYGRSNLPISIKYKKLGNEEAMIRQREHHKNDRLKHEVGKYTREPPPLKNGLKRIKVRGPTYVGSXSXLD

SEQ ID NO: 116730 - protein, 209 aa, Gossypium hirsutum
  Clone ID: AW187717.1.pep
YYLQHQNGNVRLHNPLLQYGTVAGTIGHVLALCKNRLPKFSNSSNSHGKLGYHHPPLCSTSPPLSCLTSLSPSFSPSSLTHLSHLSSSLLYHPSTSSFSLRFSLIMDLELPRFHLLPSVITSPPSLSFPLWLPPPRPLLGRDSILRISQIVDSVGPPCIISAEFLSRLSSLHVSRPSPVDCICALYLNFTGSSPSPVLMCICVIVLIPC

SEQ ID NO: 116731 - protein, 191 aa, Gossypium hirsutum
  Clone ID: AW187712.1.pep
MQTGSSYFFTRRSSRGVVSCEDYHEGATVAIPFNWESEPGTPKVKSCEIPRLPPLTPPPSYFYATPKRTSVKQHSKPKLLNTIFPKRLRRKPRVQLSPAASSSSSSSSASSSRSSSPWPRAYSLPSSPISASNLYAGNELPRGELFSGSRAADKENHEYEYSVSTPCFGCGGGTGPMSQGFCSTMLKALLK

SEQ ID NO: 116732 - protein, 84 aa, Gossypium hirsutum
  unsure (1)..(84): unsure at all Xaa locations
  Clone ID: AW187706.1.pep
XXRTPPPGKQESEGTSKAPGLRSTKSNPISLPGRVASFSKETTSFTERAGRHTRAASDGFAGHVHPKLPDYDDLATRLAALRRQ

SEQ ID NO: 116733 - protein, 82 aa, Gossypium hirsutum
  Clone ID: AW187702.1.pep
KSKSKNFTKIQAFEYREITTSQTNRKPTPSIESKTDLANRKPPRLLFVSSFFIFFLCVFETNHFVVRSSIKEDKKDKKNLSF

SEQ ID NO: 116734 - protein, 117 aa, Gossypium hirsutum
  Clone ID: AW187695.1.pep
SMCCLNMRVSPRVWYRMYLFVRTFWKLLRHRWALFVAVGSRLEIAVEGFALVFNARFVGTLIILPSDTTSILIVSLLALHLVTECPIWWTVIVVVRRVRRRSLDLSWWNQKLICWEN

SEQ ID NO: 116735 - protein, 58 aa, Gossypium hirsutum
  Clone ID: AW187687.1.pep
MSPLQPLFSENLVLRYKHVRAYAIVASLTCKFGTCSVKRHSRKMCFVLQYFFAVNSIK

SEQ ID NO: 116736 - protein, 58 aa, Gossypium hirsutum
  Clone ID: AW187683.1.pep
IMLSCVWFGHPLSWEQWIGAVIVFGSLYSKNFLKKASTNPPPLLLTQDGAPSPVKGIP

SEQ ID NO: 116737 - protein, 57 aa, Gossypium hirsutum
  Clone ID: AW187680.1.pep
NSPIFMEYPIPEKENSRPCTTVYMIRKWNCFCENKPFGGMEQFSQLHNCGLRGTCPW

SEQ ID NO: 116738 - protein, 170 aa, Gossypium hirsutum
  Clone ID: AF150724.1.pep
LYGVIGGTVASSENNSSESSRSSSSSIESAKPSIIIIILILSITLLVSVSLCLLLRHVNRRCLRHLSRSSTSTIIASTASHRVSPEQSPTALLLDSLPLFTFSSITRRRSNGDSTVLGDCAVCLSKFEQQDQLRLLPLCCHAFHAQCIDTWLTSNQTCPLCRSPLFASEP

SEQ ID NO: 116739 - protein, 51 aa, Gossypium hirsutum
  Clone ID: AI055740.1.pep
LLRIWKPRPHTIFQIWHLCAKPWVSRIGFPFKGILIHRFTEIWPLNSLLNL

SEQ ID NO: 116740 - protein, 93 aa, Gossypium hirsutum
  Clone ID: AI055733.1.pep
IFIPGPFLYYKLGAPFLNFLVFCIRTLLILKLPILFYQHLFPSSYIYLTLCVAQPLSLSFNFVLTSFIYFINLYYCLIHIFFLNLSLFLSPLS

SEQ ID NO: 116741 - protein, 55 aa, Gossypium hirsutum
  Clone ID: AI055732.1.pep
IYILSFIISFIYSLIFPNILTIYIYSLLLYKLFSMIFYVLFMIMLSIINYSYSHS

SEQ ID NO: 116742 - protein, 92 aa, Gossypium hirsutum
  Clone ID: AI055731.1.pep
ACFPGTILYNLTRFRRLQIGPEPLNSLSRSTIVHADKTILSGSRVRDIGQNGGDIDLHRRPGVNDGDGSDEYNEITNEEESREFSHFRGFSE

SEQ ID NO: 116743 - protein, 78 aa, Gossypium hirsutum
  Clone ID: AI055729.1.pep
TKKARNKKQTEPDIDFTKALDDELLDIFAPPKNLKSLLLPSNRAPCNTKLPEDCHYQPEDLVKLVLLPNVMCLGKKRQ

SEQ ID NO: 116744 - protein, 187 aa, Gossypium hirsutum
  Clone ID: AI055713.1.pep
MANLSPEVNPPTPQIPDSTLDLVQLPNHSNLPSIPTPNPVQYSWPGSGRHSSYRGIRSRSGKWVSEIREPRKTTRIWLGTYPTPEMAATAYDVAAIALKGPDTDLNFPDMILSYPKWLLHKPNSSGCCSAAASSYPCRYGVSNRIKATSNEVPDVNTAWSWSGQIYCRKSFNFPDVAWRRMLYPPDH

SEQ ID NO: 116745 - protein, 215 aa, Gossypium hirsutum
  unsure (1)..(215): unsure at all Xaa locations
  Clone ID: AI055712.1.pep
VDPNSPLYDEKRNVNHQPPNMLDLDYAGTEEELSKRDQIKSNLSVMYRQMVTYKTASLFLGAAYRAGDDPSPGMGSIENNPHTAVHRWVGDKRQPFSEDMGNFYSAGRDPLFYAHHSNVDRLWSIWRTLXGKRRPDXTDTRWAQFLVXFYDENANLVRVKVRDSLNMKTFGYDYXXVNIPWLKNKPIPRKSGRGKSGGQAVAAETKTPPYSIAFL

SEQ ID NO: 116746 - protein, 176 aa, Gossypium hirsutum
  unsure (1)..(176): unsure at all Xaa locations
  Clone ID: AI055708.1.pep
AGALESVVSSTFYGSNESAGGISEVHVALCGIFEGLLRELLSLNWTEPALVEVLGHYLDAMGPFLKYFSYAVGIVINXLFELLNSLPFVVKDPLTSYSPHALMPYLYIINSVCLYTLPIYFFLLEGIVYTLHFSPIHSLFFPVIIIISFNHFMSIDSLTMSTSIFILLYPPSTIYL

SEQ ID NO: 116747 - protein, 139 aa, Gossypium hirsutum
  unsure (1)..(139): unsure at all Xaa locations
  Clone ID: AI055697.1.pep
EKSXSGFSQNCELRGAIYYRPRLCIEKGHNSTHFCANVKESVHTPRYQRGFGRNWTTFNQCAQWNKCTMWVSDPPNITKPNSQVAKPRXTIELGPKLLARGGTKGXRSXPXQGEGLAGPXXXGRKALPFAGYSKGXSWH

SEQ ID NO: 116748 - protein, 82 aa, Gossypium hirsutum
  Clone ID: AI055694.1.pep
SGFYNRFMFQGACSSNDNFWVGITMLFWLFKMWVIVVYTNDYFPLQYLLQILVPPIGLYQGLQYTSFYRYLHKIFQICFLKR

SEQ ID NO: 116749 - protein, 85 aa, Gossypium hirsutum
  Clone ID: AI055692.1.pep
VHSIWILQVWKPPFNWTQDSLATISFQWQGYRFQSTLTYLEIECLSEKDMACRSLLDIFSEIRGFGSIKIPWNHKNYYPFYILKK

SEQ ID NO: 116750 - protein, 84 aa, Gossypium hirsutum
  Clone ID: AI055688.1.pep
EDASCSRISKEISRKYSRNSLRPSEILKSPFFYNNVYHLYIEYDRTPSTFLLNEPQTNPFFTSPNRRKTLFKMEANVNWEMCPV

SEQ ID NO: 116751 - protein, 133 aa, Gossypium hirsutum
  Clone ID: AI055687.1.pep
MVLVSVFLEILRKPTIGDVLKELMIFIAPLWIAVIVGVLVGWAWKPKWANIGREMMIDCSVSKDSTPASSDSSSTSFNLISSLNSIKFLLPSCISWTDDEAQSDPFFLPPTVDSNCSSLQIPKGKTSVTNDDL

SEQ ID NO: 116752 - protein, 189 aa, Gossypium hirsutum
  unsure (1)..(189): unsure at all Xaa locations
  Clone ID: AI055681.1.pep
ADWPADLDESPNELSWWMTAVESIKAFGNEHYKKQDYKMALRKYRKALRYLDICWEKDRIDEEKTSSLRKMKSQIFTNSSACKLKLGDLKGALLDTEFAMRDGDNNVKALFRQSQAQMALYDVDAAVEAXKKALQLEPNDGGLKMELAVAMKXINDRRNEEKKWYRRCSTKLNRAGSNGTFQAKLNCDI

SEQ ID NO: 116753 - protein, 73 aa, Gossypium hirsutum
  unsure (1)..(73): unsure at all Xaa locations
  Clone ID: AI055673.1.pep
KKFQKCQYARVTLFKTEGRGWGLLAAEYIKTGHFIVEYCGEIISWKEXNLRSQAYENQGLKDAXIISLKALNH

SEQ ID NO: 116754 - protein, 207 aa, Gossypium hirsutum
  unsure (1)..(207): unsure at all Xaa locations
  Clone ID: AI055670.1.pep
MHSTHHHVAVSPYKSSASRLTIFAHVFGILAFALMLVWLLHYRGGIEYDSYNAVRVFNVHPFLMFCGFIFLSGEAMMVYKTVQATHMVQKVVHMILQLLAFVLAVVGLCAVFKYHDMTNIEDVYRLHSWDRIXPFLLFALQWLTGLNTFRFRQPELTRQSXLPWHICGGRTWYHVGSAGLTGCWRSSFIDWQYRELVGNFGMLSFVG

SEQ ID NO: 116755 - protein, 201 aa, Gossypium hirsutum
  unsure (1)..(201): unsure at all Xaa locations
  Clone ID: AI055669.1.pep
DMVMDKEDKDAIGHEENGTSIGQEPMDIATASTQASQEACEIPGSDVTILEGHTSEVCACAWSPTGSLLASGSGDSTARIWTIADGLCKSGAQNSPLNVLVLKHVKGRTNEKSKDVTTLDWNGEGSLLATGSYDGQAXIWTTNGELRSTLSKHKGPIISLKWNQKGDYLLTVSXDKTAIVWDERPXEWKQHVEFXTGPTLM

SEQ ID NO: 116756 - protein, 127 aa, Gossypium hirsutum
  Clone ID: AI055667.1.pep
ANPASEKRRHLLEDVDGELEMEDVAPEIEMSSTSGAAAINTAQTLQEHCDQHFPLPFAPPLPQDVRPSSPPPPSSPPPPPPSPPPSPSPLPSPIPRPISGPYTNNVDSIVHTSIQNRQDDLRSMVPH

SEQ ID NO: 116757 - protein, 105 aa, Gossypium hirsutum
  unsure (1)..(105): unsure at all Xaa locations
  Clone ID: AI055664.1.pep
MLEHELCSSRVLSPVREESGDEELSVLPRHAKVIVTGHNRTKSVLAGLQGVFXISVGLGGXHLLGLKNGVQIRLQXNALTVLELSTASEFTMIMICILYQWFLHW

SEQ ID NO: 116758 - protein, 104 aa, Gossypium hirsutum
  Clone ID: AI055663.1.pep
NSVFLNQFTLIIIRTRSFNGLLFLLFLFHLLAFQNLIVFVFFLLFIIHYKPITFKLVQILEVLTRERRQLCGGRERVGDESTVLNDKIDGSTTFTATTKLTKDG

SEQ ID NO: 116759 - protein, 195 aa, Gossypium hirsutum
  unsure (1)..(195): unsure at all Xaa locations
  Clone ID: AI055662.1.pep
FAPNLLLTVPRKKTGILDDVRASSWLDAMKSSSPRHTSTRDYNHEIVSADTDVAYRTWMAKYPSALSSFEQITNFAKGKRIALFLDYDGTLSPIVDNPDFAFMSIDMRAAVAKVAKYFPTAIINGKSPDQVFXLVGLPDLYYPGSHGMDIMGPVRDRLXDPPNCIRTTDKHGKGVKLFQPASESXPMIDEVLTTW

SEQ ID NO: 116760 - protein, 66 aa, Gossypium hirsutum
  Clone ID: AI055656.1.pep
RENKLCIEYCYPIGLRREWWKLMRWSTEVKVGKEAFSEKSFWVKENGVTHVVCISWLHGWVFITRR

SEQ ID NO: 116761 - protein, 102 aa, Gossypium hirsutum
  Clone ID: AI055646.1.pep
FLFQQFSFTNVSATLLSLNFCSQNLSFFATSHIPNYPQLSSGTAMDEEFLFDDPTQLLDLASDFAHHPVLLTMLMSKILSTISLSLSSSGKRADHGTALSHG

SEQ ID NO: 116762 - protein, 156 aa, Gossypium hirsutum
  unsure (1)..(156): unsure at all Xaa locations
  Clone ID: AI055645.1.pep
PRPKDRQMIQDRVKELREIVPNGAKCSIDALLEKTIKHMLFLQSVTKHADKLKQTGESKIKENFEGGATWAFEVGSQSMLCPIVVEDLNRPCQMLVEMLCEERGFFLEIADLIMGLGMTILKGVIGNLDGKIWARLIXEVNRDVPRLKVLSFLSYF

SEQ ID NO: 116763 - protein, 96 aa, Gossypium hirsutum
  Clone ID: AI055644.1.pep
SCDIVPANLTLGGSFLFLEDLQCGHFRYIGKSLFNMEKADPYSSRLTAWKPFSRSFPATGTLAAFPGVLLWSPVIESCVSPSLKTLLFATTFFASS

SEQ ID NO: 116764 - protein, 88 aa, Gossypium hirsutum
  Clone ID: AI055641.1.pep
PSSTHHSNENFLGFSIKCIEDSLFLDFGCGRFVCGGKYEEINVESRAFQRNVHVSHSIAQRLWERRGSDQLSVIVVSLLPFAIISGFF

SEQ ID NO: 116765 - protein, 87 aa, Gossypium hirsutum
  unsure (1)..(87): unsure at all Xaa locations
  Clone ID: AI055638.1.pep
IGQLDTLVTFKIIGLIVLKEPTLDPLLRVQPLIFFSINGCGSSEKMGLGVLWDRFNPFGTPKLFKIYGLSPALKHWASFGFDHVKIX

SEQ ID NO: 116766 - protein, 120 aa, Gossypium hirsutum
  Clone ID: AI055637.1.pep
LFAGMSVGDFFPEWEWVHSVSGYKRRLMKNLNELRRVCDEVIQEHLQRGETGIKEDFVDVLLRVQKQDNLEVPITDDNLKALVLDMFVAGTDTSAATLEWTMTELAKHPEIMKQALERGL

SEQ ID NO: 116767 - protein, 212 aa, Gossypium hirsutum
  unsure (1)..(212): unsure at all Xaa locations
  Clone ID: AI055630.1.pep
AGRTGTIGLLKTLNRDELLEVLSQGFCQHCEALLEERIHQLLNKRGSESGSESTVTSNNTLSNPVTGKQLARTSPPPPAANSDILLNDGLGGSGSTSSDNGLSEEQKEHIRFSQVVRKKGFXTWGKINGKSMNVLKGLELHTKVFNAEEQKKIVECVYNLQRMGQKGQLRDRTYSEPRKWMRGXSRVTIQXGCXYYYAMDYKGNPPGSLEKK

SEQ ID NO: 116768 - protein, 179 aa, Gossypium hirsutum
  unsure (1)..(179): unsure at all Xaa locations
  Clone ID: AI055625.1.pep
EQNPNGEPGLKASNSRKRKAVPKAKTKDTSSSPSANASKVTEPNEASNEKRCKLSDSNGNENGSAKAEEDAKGDKANNTKAPEPPKDYIHVRARRGQATDSHSLAERVRIEKINERMKLLXQKLGPGCTKVTEKALMLDEIINYVQSLQRQVEFLSMKLASVKTKLDFNVESLIVKDIF

SEQ ID NO: 116769 - protein, 94 aa, Gossypium hirsutum
  unsure (1)..(94): unsure at all Xaa locations
  Clone ID: AI055618.1.pep
VHCLLNVLKASVLLSWIQVYGNNVEIQALSDMYNRPIHIYSYSIXPINIFHGSYNFDTPSIRLSYHHGNHYNSLXDPRRLTVVLAWIICLRRCV

SEQ ID NO: 116770 - protein, 232 aa, Gossypium hirsutum
  unsure (1)..(232): unsure at all Xaa locations
  Clone ID: AI055616.1.pep
DRLDTMVQPRLTDALSNRKVDVAQDLRGILIRIGRFKSLELHYTKVHLKPIKQLWDDFDSKKRVGKLANEKSEVERLSNNNEQSSSLAVSFSSWLPTFYDELLLYLEQDXKXXCWFAFPEDYKTLVPKLLMETMAACGXSFVSRINLAMEKFVPETKAFAKGILXILSGDMXKGNKIILSSRSLDGLHKCRDLCKNIRLISNLIGSLMHTKAGLSLIFTEYDHERLSFLKRG

SEQ ID NO: 116771 - protein, 94 aa, Gossypium hirsutum
  unsure (1)..(94): unsure at all Xaa locations
  Clone ID: AI055611.1.pep
GIYFKHRILRNLDSSIXFFLSKGILMSISNNPGARLLLLLKLIQGCNSSFQWMPKPYQAKSVHACSASCFSFSFFHVSLKFALQQHKEYWVSRI

SEQ ID NO: 116772 - protein, 127 aa, Gossypium hirsutum
  unsure (1)..(127): unsure at all Xaa locations
  Clone ID: AI055608.1.pep
FILNLPTDSPNFEGIYLILPSIDSLSWILQIMGIQNDIVKFNVGGRIFQTTATTLANADRIRXSCHCSRQLGLKTXDQRRGILIRSKPXCSXGPLDLXRRPNSTSXQMSRRLFTRSHGXRLIGXFGR

SEQ ID NO: 116773 - protein, 165 aa, Gossypium hirsutum
  unsure (1)..(165): unsure at all Xaa locations
  Clone ID: AI055605.1.pep
FSDDNREEAKQYLSSVKGLQKAMQYLVSHQASSEMLVRAQALMQTAMKRLEXEFYQILSXRFYLDPESFSAHSSSSRPSASRXVFQTLEEDESENESRGREXXSIPGAXKSGRSLQWRNLRAIXAEAHDXSLGTPKECIXNYXNIRKSXVDEALNVSELDVELVR

SEQ ID NO: 116774 - protein, 98 aa, Gossypium hirsutum
  unsure (1)..(98): unsure at all Xaa locations
  Clone ID: AI055603.1.pep
KLGXGVFGLPDMTMVPAENLPKQHHLPHGGGGGFYGYCGSSYTESFGLMSRVYGYDFHAEAYVGSDLAANRMAEDESTTNSLNEAGSNSKDNNQELEL

SEQ ID NO: 116775 - protein, 203 aa, Gossypium hirsutum
  unsure (1)..(203): unsure at all Xaa locations
  Clone ID: AI055601.1.pep
DNAQNAFVPGRLISANVLIAYEFLHTFRKSERGXXFMXIXSXMSXAYDRVEWAFLKEVMIXYGFTQEWVSLIMRCISTVSYVVNTNGREAVFLXPTRDSDKVNYLIPFLFLICSEGLSSLLRIVTREGLIKGVKASKRGPTISHLLFADDYILFGEATKSRTRILKDILKEYEICSGQCVNFNKSMIFFSSNTVEEDKENIST

SEQ ID NO: 116776 - protein, 162 aa, Gossypium hirsutum
  unsure (1)..(162): unsure at all Xaa locations
  Clone ID: AI055600.1.pep
VGMINQIKREISVMRIARHPNIVQLYEVMATKSKIFFIMEYCKGGELFNKVANGRLKVDVARKYFIQLINAVDFCHSRGVFHRDIKPENILLDENENLKVSXFGLSALAESKRQDGLLHTICGTSAYVAPEVITXKVQWSNTEVWAWDGVYRVWQLSPFMIN

SEQ ID NO: 116777 - protein, 136 aa, Gossypium hirsutum
  unsure (1)..(136): unsure at all Xaa locations
  Clone ID: AI055599.1.pep
VTSTAQELSLGVDFAEIYKKSDLYRRNKALIEDLSKPAPGAKELYFATQYSQSFLTQCTACLWKQHWSYWRNPPYXAVRFLFXTVYLDVGTMFWXLGSKTKRFXDLSNDWVQGGCWPFPGIQNALLRPCAGKGTSF

SEQ ID NO: 116778 - protein, 75 aa, Gossypium hirsutum
  Clone ID: AI055597.1.pep
KIKNMQEKIFLCLVLFFSQCFSLKKELVINSSSSFLCTGSGYLHFSFTNYFSLKKKLAINSSRTCRRSVHQFKNT

SEQ ID NO: 116779 - protein, 65 aa, Gossypium hirsutum
  Clone ID: AI055595.1.pep
KNTTLNLSPFWVKIYNIPFDQMDRQTMLEVGEAIGEVMAIDWRDRDGGYIEYIRVKVKIDVLNLE

SEQ ID NO: 116780 - protein, 70 aa, Gossypium hirsutum
  unsure (1)..(70): unsure at all Xaa locations
  Clone ID: AI055592.1.pep
RFFNKKSFSXTSWIIXNLSPLSSWGKWDRGRLKGRGHKVYKRXIAWHVEDKLLRIHKQXKAPPRWFLITS

SEQ ID NO: 116781 - protein, 112 aa, Gossypium hirsutum
  unsure (1)..(112): unsure at all Xaa locations
  Clone ID: AI055588.1.pep
MGSYFSLAQWQELELQALIYRYMLASAAVPPELLHPIKKSLLYSSSYFLHHYQPAXLQSGYWGRAAMDPEPGRCRRTDGKKXRCXQDVCLDRVLERHXHRGRTVQEACGMPH

SEQ ID NO: 116782 - protein, 60 aa, Gossypium hirsutum
  Clone ID: AI055584.1.pep
SPAPVSGPTRSPTTYTVGDNLGWTVPTSGASMYQTWANGKNFMIGDILGKDFRVTIGFRI

SEQ ID NO: 116783 - protein, 61 aa, Gossypium hirsutum
  unsure (1)..(61): unsure at all Xaa locations
  Clone ID: AI055583.1.pep
QTLHDYGSLSCLSCLXLDSVQLLVSSLVLCWKITLLHNLLMLDKRRSYFQCILPLSTCKTI

SEQ ID NO: 116784 - protein, 68 aa, Gossypium hirsutum
  Clone ID: AI055581.1.pep
ELGLTGFFDWLGLGAFLVVSVVRGLLFSELLFQLFCQVQVFPWIHFYCCSFFFYDLILVWLFHFFIER

SEQ ID NO: 116785 - protein, 52 aa, Gossypium hirsutum
  Clone ID: AI055576.1.pep
SSTQPLNNDMQVCGSHKLSIDHKQKCLRSIPNSHPFLSLFSTNFKECFPQFF

SEQ ID NO: 116786 - protein, 91 aa, Gossypium hirsutum
  unsure (1)..(91): unsure at all Xaa locations
  Clone ID: AI055573.1.pep
EASNEISQFSYIPFDIEPKANMNLSKNSSRSRNMNWILXSPAMEDIRCLVKNHEYHWYLLNPLWKIKEIFISILFKLFMKPYXRMSKXGCG

SEQ ID NO: 116787 - protein, 151 aa, Gossypium hirsutum
  unsure (1)..(151): unsure at all Xaa locations
  Clone ID: AI055567.1.pep
NFCPPNYALPNDNGGWCNPPRSHFDLAMPMFLKIAEYRAGIVPVSYRRVPCRKRGGIRFTINGFRYFNLVLITNVAGSGDIVKASVXGSKTGWMSLTRTWGXNWQSNAXIWVGQSLSFRVTGSDRRTSTSWNIAPSIGXXGQTFTGKNFKV

SEQ ID NO: 116788 - protein, 43 aa, Gossypium hirsutum
  Clone ID: AI055565.1.pep
YYFVKVIISLFLIFFLHYTSSLFDNIYLVYLITFVSCVLVIYL

SEQ ID NO: 116789 - protein, 92 aa, Gossypium hirsutum
  Clone ID: AI055563.1.pep
MDPEVIEIPPPVPYSFKSNKKKQVVIHEVIDVDNDGDSSDIVILDERVDVRNKGKAVKGSSGIYNAIQAEDFLGQTPGSLNTIEPSKHSTPG

SEQ ID NO: 116790 - protein, 78 aa, Gossypium hirsutum
  Clone ID: AI055561.1.pep
LSHVHILCPSLCLVCELHTFSPYRFSISVDWIARNWSPYVIVYSFYYLFLIFVFDICIRYIRYCTSIIYQIYEIFYQC

SEQ ID NO: 116791 - protein, 81 aa, Gossypium hirsutum
  Clone ID: AI055560.1.pep
VFMSLKGLTMRSQRQAAYGLIPDSVFFFGLLSISQLPLLEPTLPAGGMIPIFESNLIFRLQVKATGGGRCQKQNVVFTARR

SEQ ID NO: 116792 - protein, 131 aa, Gossypium hirsutum
  Clone ID: AI055558.1.pep
GTPGYMAPEWLSSIITEKVDVYSFGIVVLEILCGRRIIDESQQDERHLLELLRRKQEEGQLLDLVDKCNDDMQSNVAEVVEMIKVAAWCLQTEYANRPSMSTLVKHFEDLVDAVINVNEDFQNELTSQAPV

SEQ ID NO: 116793 - protein, 119 aa, Gossypium hirsutum
  unsure (1)..(119): unsure at all Xaa locations
  Clone ID: AI055554.1.pep
ELDSDQHYSVGRHGPNLLNEDARTSIKRSMSDGNILCGTDSPMSASNVRQESENRGEAISESTHEMPAYGISYSRFTPRMSCRQLFGEIEDQFLGSNRIXLRKRDECNCTNFDMDWLSS

SEQ ID NO: 116794 - protein, 79 aa, Gossypium hirsutum
  Clone ID: AI055553.1.pep
AGLETSRQHAKNMNFLSNMPNCSESSRPNLVASTSNLKSSDFFPEIGSFGASSSKEDTFNKTDFMYVLLFLIYIPPSAV

SEQ ID NO: 116795 - protein, 114 aa, Gossypium hirsutum
  unsure (1)..(114): unsure at all Xaa locations
  Clone ID: AI055549.1.pep
EAHNPFLKWLFVLVLKSSFFSLHTSPHFKLFFLLFHSLSETIIAERAQLLLDFSQVPLHPFTYLFIYGKQNTNSKCFILFKKLDVTLYFMLIKRGGCFRXKFLGLFITYLLNLX

SEQ ID NO: 116796 - protein, 203 aa, Gossypium hirsutum
  unsure (1)..(203): unsure at all Xaa locations
  Clone ID: AI055546.1.pep
DVVPVIIFFHGGSFAHSSANSAIYDTLCRRLVGICKAVVVSVNYRRAPENRYPCAYDDGWTAFKWVNSRSWLQSRKDSKVHIYLAGDSSGGNIAHHVAARAVESGIDVLGNILLXPMFGGQERTXIXKRLDGKYFVTLRDRDWYWRAFLPXGENRDHPACNPFGPNGGSLEGNQIPKSLVVGAGLDLIQDWALGYVKAXKACR

SEQ ID NO: 116797 - protein, 191 aa, Gossypium hirsutum
  unsure (1)..(191): unsure at all Xaa locations
  Clone ID: AI055543.1.pep
MEAEVEAAKKRCRELIEKIDCLDVATIKSNCKHTLLKLAHSEFSFLSRFPIHLASSQPLSVNLGHLEAIVYILQQPFITAVSXRVCKPLPLSFSSKHKTLSAAASLNSIHVXIVCNLNKTQFGLLXSDRNPNYITWHSNNKTRVLKSKNXQVLDAAKSINTLRPYSIXLFFSNGLTIFNHQKLKDEXCASC

SEQ ID NO: 116798 - protein, 210 aa, Gossypium hirsutum
  unsure (1)..(210): unsure at all Xaa locations
  Clone ID: AI055540.1.pep
KLIKDYIDEVSTQLRMVCDSDSEELSLEEKLAFMHETRHAFGRTALLLSGGASLGAFHIGVVKTLVEHKLLPRIIAGSSVGSIMCAIVGTRSWPELQSFFEDXWRSXQFYDQLGGNLQLLESHETGAXHEIRHMXWMLRHLQXILLSEAYDMTGRVXDNSLLTKNMSPSMPNYLTYLCCIWSAVALLCXXGLLSSGLMAKIDGELSLPSP

SEQ ID NO: 116799 - protein, 90 aa, Gossypium hirsutum
  Clone ID: AI055539.1.pep
LVAKLELFVNAKLLGLKCESWIEACSIPSKFLHVFGGSYVYTRILNALDNSIKHQYLNKNKSQSNIRRKTSRRIGNAGIAQWLNSSSQLR

SEQ ID NO: 116800 - protein, 132 aa, Gossypium hirsutum
  unsure (1)..(132): unsure at all Xaa locations
  Clone ID: AI055532.1.pep
GLSLRERVGLASCNDWIXVSSYRGHGSPCSGPRSGNHHMQALQWSCCHSIFPFYDTLFHRESISNFSCSRVIDSDQQSSNELEASRVLQNXHISTRLIGDFLNXLRKHQKDLENLVSXAFEKNFLYPRYTNR

SEQ ID NO: 116801 - protein, 70 aa, Gossypium hirsutum
  unsure (1)..(70): unsure at all Xaa locations
  Clone ID: AI055531.1.pep
SSPRCFPSKFNNCYNTSTSXEPVNTGEFSWGYLNLHXSFIXFLKVSVSNXXVRSIPVFTRESHQYSITVR

SEQ ID NO: 116802 - protein, 89 aa, Gossypium hirsutum
  unsure (1)..(89): unsure at all Xaa locations
  Clone ID: AI055529.1.pep
GEKMMNAXXVXIVIPIINTXLFNXKLGETFKKACNFACTRAYPPRFLIPTCLIGYAFDVGNLKSLQEGFSIKSSLINLRLMLSKLITSA

SEQ ID NO: 116803 - protein, 79 aa, Gossypium hirsutum
  Clone ID: AI055514.1.pep
FLLLQNLVSSTSLKTLSSKSSFMSYYAIHLGISKNYCICKKTLNLLSTSSCFSEFRIHILSGTKLDHPISNNAQLKART

SEQ ID NO: 116804 - protein, 172 aa, Gossypium hirsutum
  Clone ID: AI055513.1.pep
RKIGRKLYSSMIVGLCKADQADYALSFMKEMKSNNVYPSMESYELLIKLLCSKKSYWLAVKLVNELENSRGYITPFIGNVLLLHSLKTKQLYEAWVQFKEGEDETSDVSMLGRVIGIFSGCIKAGIDIERAEEIIAKCFPLDIYTYNTLLKKVSKSTVEEALRCMIGYAKRL

SEQ ID NO: 116805 - protein, 101 aa, Gossypium hirsutum
  unsure (1)..(101): unsure at all Xaa locations
  Clone ID: AI055510.1.pep
MEAMIKKYHQKFKKAKDEMSKWDDLQSRLISHFRNASSIISRLQFXCVGGMEAAVMLKQMDSLQTILLSMKNTIFSXEDFLGVVLSLEKLIMMVNSFQMYH

SEQ ID NO: 116806 - protein, 217 aa, Gossypium hirsutum
  unsure (1)..(217): unsure at all Xaa locations
  Clone ID: AI055506.1.pep
SEGEPFAVPGLPDQIEFTIGQLPGNLNPRSNMKELSKKIIAAEEGAYGSIVNSFEELEAEYAKSYQKIKEHKVWCVGPASLCNKDNIDKAKRGNEALTDENQCLKWLDSWPASSVIYVCFGSLNRLTPXQLMELGLALEASXKPFIWVIEEXYXREEMEKWLAEDGFEERVKGRGLLIKGWATALLIXSHPFVGGFXTHCGWNSXLEGSXVGAMITW

SEQ ID NO: 116807 - protein, 179 aa, Gossypium hirsutum
  unsure (1)..(179): unsure at all Xaa locations
  Clone ID: AI055502.1.pep
MAIFKEIRELSGXIPXIXXPLNXXXFRPISLCTVIYKIFPKSVSNRLQKVLDIYINDFQSAXVLXKLITDNVLLAYEXFXSFKNKRSGKKLFMALKLGMSKAXDQVDXHFLKSMMSKLGFVDPFIYFILHCIXSVHYSILLNQFYXNCEEGFSFNPLRGLRQGDPXSPYLFLFCGEGLS

SEQ ID NO: 116808 - protein, 169 aa, Gossypium hirsutum
  Clone ID: AI055499.1.pep
NIEDSVGGGILKQDDQSTEYHMVKYEESRDIPASVSETNLVEDMKEGPNLVTNENCQEAAVESHHLSTVNAVSVGDTDKLNSSGHASQKILISFKKPVDQKSLSRSLDPVSQNVDCLPQQSDTKQRQAASSMSHSSGESFPSYMLPDQQSYFALQPQSSLASLPHHHHH

SEQ ID NO: 116809 - protein, 93 aa, Gossypium hirsutum
  Clone ID: AI055498.1.pep
PQNYYYYTRYITPICGFLFSTYISIYGINLLWKIQSGKLSHPRGEKQTIMEYPSYKFLHFWRQPSSPLPIPFLQVSCYTLLTSFFKLFLSQHC

SEQ ID NO: 116810 - protein, 177 aa, Gossypium hirsutum
  unsure (1)..(177): unsure at all Xaa locations
  Clone ID: AI055497.1.pep
GRRNWDGTGGNNHAIEYYKETGYPLAVKLGTITSDLDAADVFSYPEDDSVIDPLLAQHLAYFGIDFSSLQKTEMTTAERELDQNTNFDWDRIQESGQDVEPIFGPGYTGLVNLGNSCYMAATMQVVFSTQSFCRRYFMNXSLXMAFETAPADPTVDLNMQLTKLXHGLLSGKYFFQQ

SEQ ID NO: 116811 - protein, 213 aa, Gossypium hirsutum
  unsure (1)..(213): unsure at all Xaa locations
  Clone ID: AI055495.1.pep
LHRGGLPFCNCLRGFHQKSQSAWNLSDFSDGCERTTKLQCKENRTLTNGKPDKFLTSPNVKLPQNAQPVTATSISECESTCLQNCSCTAYAYDSDGCRIWIGQLLDLQQLADDASDGKTLYLRLAASEFSSSSNNNGIIIGAAAGVVSXVLVPCIFGIWRLXXXXHDNPKAVDGSLLAFRYRDXQSATKNFSXNXXGRSFXLVSKERCRIVIL

SEQ ID NO: 116812 - protein, 146 aa, Gossypium hirsutum
  unsure (1)..(146): unsure at all Xaa locations
  Clone ID: AI055487.1.pep
HVILTWXALHQIDSATLRSTAAAWHDEFAPLPKPLLVVNIGWPTSHCRYGADLAKXDAFVVTADSVSLISEACSTGKPVYVMGPERCKWKLSDFHKSLRERXGVVRPFTGSEDIAESWSYPPLNDMAEAASQVREALAERGWRVRP

SEQ ID NO: 116813 - protein, 208 aa, Gossypium hirsutum
  Clone ID: AI055483.1.pep
QFHDSSPKEDNIALYFFAKDLESYQNNYKVLLDTMVKDDLALKGNFEGVELLIFPSNHLPEHCQRWNNLLFLWGVFKARKANCSNSSKSVCNPDASMVCLEKQRSSDIAQPVDNESAACDSSCNVVPVTTSVEKTCISTDRVGDNKVASFEQTFGGIKEKLEEQDVKVDTKFLSRICTSSTQVEPKSKRKTMYLPSFSFPFFPFEMEM

SEQ ID NO: 116814 - protein, 72 aa, Gossypium hirsutum
  Clone ID: AI055481.1.pep
EGKLSFLYTNLLSIGCLRSCFSLYCRLLESSDGWNQVRVHSHYPSFTSIENLDILMSSYKWHEFRVLKLFCL

SEQ ID NO: 116815 - protein, 105 aa, Gossypium hirsutum
  unsure (1)..(105): unsure at all Xaa locations
  Clone ID: AI055475.1.pep
MYFRFYQIIERIKKYFDILGGPATFIQAAVPHIIEQTDNVFFKKTINTLKQTSDICWDMIKEIPCLTCPQKPQGSMAVMXMDQYNSQCLXSDDIDFCXRLAKEES

SEQ ID NO: 116816 - protein, 63 aa, Gossypium hirsutum
  unsure (1)..(63): unsure at all Xaa locations
  Clone ID: AI055470.1.pep
FSPSNTGGAKMDRLLDFDSIFLENLISVPLKFSLRSLTKLFSQVPQKNGSDTXCWFSKDLIEV

SEQ ID NO: 116817 - protein, 42 aa, Gossypium hirsutum
  Clone ID: AI055465.1.pep
IKVHVLNSQLSKVHSLIAEFDQTIMGPLWYHGFLFAHFSLRT

SEQ ID NO: 116818 - protein, 185 aa, Gossypium hirsutum
  unsure (1)..(185): unsure at all Xaa locations
  Clone ID: AI055464.1.pep
WDGSVIYGNNEEGMRRVRAFKEGKLRIGGDGLLEHDEKWIPISGDVRNCWAGFSLLQSLFVREHNAVCDMLKEHYPDLDDEKLYRYARLVTSAVIAKIHTIDWTVELLKTDTLLAGMRVNWYGLLGKRFKDLFGHICGPVLSGLVGLRRPNDHGVPYSLTEEXSSGYKMHSLLPDKVILGTSPLY

SEQ ID NO: 116819 - protein, 203 aa, Gossypium hirsutum
  unsure (1)..(203): unsure at all Xaa locations
  Clone ID: AI055462.1.pep
EHLTKDDARQQFLRILRTLPYGSSIFFSVRKIDDPIGLLPGRIVLGINKRGVHFFRPVPKEYLHSAELRDIMQFGSSNTAVFFKMRVAGVLHIFQFETKQGEEICVALQTHINDVMLRRYSKARSVANGSVNGDVSNNFKPPSLEVYEKRVQDLSKAVEESXKNTNQLLGELHEKXKQELKHKKXMECLKNALRKRGRLMEVC

SEQ ID NO: 116820 - protein, 98 aa, Gossypium hirsutum
  unsure (1)..(98): unsure at all Xaa locations
  Clone ID: AI055458.1.pep
MGEDGTPTFTVDDALLHMGFGKFQILVLAYAGMGXXVSEAMEMMLLSFIGPAVQSLWGLTSHQESLITSVVXFGMLVGAYXWGVVSDXYGRRKGSHTA

SEQ ID NO: 116821 - protein, 171 aa, Gossypium hirsutum
  unsure (1)..(171): unsure at all Xaa locations
  Clone ID: AI055454.1.pep
MDLETILLLCRGFHGRIRPIXLXWEGKDDEIXVHXYXPKGINYYEMMRSSKYCLCPSGYEVASPRIVEALYNGCVPVLISKSYVPPFSDVLRWKSFSVVVSVEDIPRLKEILMKISSRQYIRMQRRVLQVRRHFEFHSPPKRFDVFHMILHSIWLRRLNVRVSDGNDVMPN

SEQ ID NO: 116822 - protein, 214 aa, Gossypium hirsutum
  unsure (1)..(214): unsure at all Xaa locations
  Clone ID: AI055450.1.pep
QETQSFSIQVEECTPGDSKEKLLRLPRLSPFFVSGYVYFAQNNFSIDSVGENKGFYEVELRWKPPPEPICRSFKDCNDWPNSSCKVAHDGKKRCTCNPPFLWNSSKVSCSAEATLQQRPGPLEKKTPAYLIILGITTAMLVILCVAFAWNHKRRRMPNRRGNLEISLHGSARRVLDFIXLDDFKEDYXEDIDVPYFHLESIFSAQITLPSXTAW

SEQ ID NO: 116823 - protein, 68 aa, Gossypium hirsutum
  unsure (1)..(68): unsure at all Xaa locations
  Clone ID: AI055445.1.pep
NDRSHKVNTKPPKXFITTIFTIXMIIQSFRSMNYGTKINGILKSDTXISISIQEKKFPPKKQKHITVY

SEQ ID NO: 116824 - protein, 89 aa, Gossypium hirsutum
  unsure (1)..(89): unsure at all Xaa locations
  Clone ID: AI055443.1.pep
TSVFFFDXVFLFFESGRRKVTRCSLRFYRHITTVYFLLFSFIVCFCVXLFYLYCVXLLFAGVXGLVVRATIGGCMLPLERRVACXYAPN

SEQ ID NO: 116825 - protein, 163 aa, Gossypium hirsutum
  unsure (1)..(163): unsure at all Xaa locations
  Clone ID: AI055440.1.pep
MMLALGNIFRCQRLIQNPVRFLVRNCHKESIPVSWGKPKIGWTKLNFDGSCKGRKGNGSIGGVIRNHKAEFLLGYAESIGRTTSTIAELSALRRGLELVLENGWTDVWLEGDDKTLIDIIVCXRXVKCAELQRHVRHINLIIPXLLHXXVTHIYREGHRAADK

SEQ ID NO: 116826 - protein, 139 aa, Gossypium hirsutum
  Clone ID: AI055438.1.pep
MGGCCCCCSSGGVEMSSAPAYYYYPQASDEHVPLSYHNVAASALSTGLLVNTNLEVSVTDAYRPPPAPMPFDAVVEPPQTPSVIQGIHNSNSNETLQTTNVNCSQGTVAVNTLETSIKSENTKEDCKAQSNTDIESLRG

SEQ ID NO: 116827 - protein, 45 aa, Gossypium hirsutum
  unsure (1)..(45): unsure at all Xaa locations
  Clone ID: AI055431.1.pep
FKFEQLGTRVLVNSEEACHHGRKXDMEVRWSLALNWISAKLLDTA

SEQ ID NO: 116828 - protein, 99 aa, Gossypium hirsutum
  unsure (1)..(99): unsure at all Xaa locations
  Clone ID: AI055427.1.pep
AEQKQVSRSLSGTIAEVTNEENSAIRVEIPDIVFVSSCADLTLPPGAGLYIDTTHGPXFLVADSWESLDGWLDAIRLVYTIYAGGKTDVLASIITSYYC

SEQ ID NO: 116829 - protein, 61 aa, Gossypium hirsutum
  unsure (1)..(61): unsure at all Xaa locations
  Clone ID: AI055426.1.pep
VNNKVKQYEIIIIFILSFTLERKNHSQGRSKLRPKKFQLHGMKFQSIFNDFYVXCYCISLI

SEQ ID NO: 116830 - protein, 131 aa, Gossypium hirsutum
  unsure (1)..(131): unsure at all Xaa locations
  Clone ID: AI055423.1.pep
DKNQRMAEDQSVVGRRRIYYDQHGSEALICSDSEEDIAEPEEEKHEFSEVEDRILWNVCQEYGLGEETLAAVSQFIGVTGSEIQERHGMLREKYSDQNIKDSEELXSEKGISLDKSLSAALDSFDNLFAVI

SEQ ID NO: 116831 - protein, 172 aa, Gossypium hirsutum
  unsure (1)..(172): unsure at all Xaa locations
  Clone ID: AI055422.1.pep
IKIFLALFALNSLSLYVYFSSSHPNHHHHHLAVNHRNTTAAEGFPKKIPHRKPHLSNPARPIIPSKPWPTIPSYLPWSFSPTVALNSCEAYFGNGFTKISNILPVKAALRSGSSWFRXCRYSETLRTSICEGGKIRMDPGKIKMSGGGEKLEDVIGRSEGKECLSLKMSFCG

SEQ ID NO: 116832 - protein, 80 aa, Gossypium hirsutum
  unsure (1)..(80): unsure at all Xaa locations
  Clone ID: AI055419.1.pep
TFEHAAATTAALAKNYGADITVVVIDDIQKEELPEHGTQLSIIRWHFSHXGFKEFSCLNHLLKKQGSAILPICDTYSDLW

SEQ ID NO: 116833 - protein, 133 aa, Gossypium hirsutum
  unsure (1)..(133): unsure at all Xaa locations
  Clone ID: AI055415.1.pep
VVTKGDQYDVREQTKENEVRNLGKPVELSGQYYKDGADEVSFLSITGFRDFPLGDLPMLQVLRHASQNVFVPLTVGGGIRDFTDSNGRYYXXLEVASEYFRSGADKISIGSDAVYAAEEYLKTKVGSFTFLDL

SEQ ID NO: 116834 - protein, 109 aa, Gossypium hirsutum
  Clone ID: AI055413.1.pep
KQSINSKASKHSTLARISVFSRSFWPFISVDSHVKKEIKPMKRKNKSKEKGTKKLEITFTILISFSLFYMRVLRKKKGRPLQSLYSWLYSRNSKRIKQNAIVSLSFFCC

SEQ ID NO: 116835 - protein, 65 aa, Gossypium hirsutum
  Clone ID: AI055411.1.pep
LHTNRHIANFVALRTLWALPYLRSHFFAGMTTTGHSKAINSFIQRFLSAQTRLAQFVEQVCSLYL

SEQ ID NO: 116836 - protein, 182 aa, Gossypium hirsutum
  Clone ID: AI055407.1.pep
RRPWEMVVCIYGFPTNVSALQFEWAWQHPQESVAVRQAAATFKSFSGVTNKIKLAYTMLTLPAWKSLNITVNYFSTKYTNHSASCPSLPEQMKVKVSPMDELPCYTEPNEEYKDYCDNLDEYDKSVMHVKLVPKHFQWKWLMFSADYLHSIHHEASLNNLNTFEKYGSHPIWSRFEHAGRNL

SEQ ID NO: 116837 - protein, 104 aa, Gossypium hirsutum
  Clone ID: AI055382.1.pep
MAPFCGHPVFENIGDFDGSTTFLLHGREKGCDFLYPGLVESVEQNCNVLLLEVEPREKRNGCKLLPRRIEVVDPFNRLAFGDTITLLETVTVQFSFIGFLIFYA

SEQ ID NO: 116838 - protein, 205 aa, Gossypium hirsutum
  unsure (1)..(205): unsure at all Xaa locations
  Clone ID: AI055381.1.pep
ETNGSSFSCSKLISLLELPLTVPRRLTIPLVEQESWSKPYAVASASLAPVLMAFLWNSQGDVGSHTRVVXWCIGVAVGCILGILARKHTLSDHPPRXFLIPWVLGGFLXIXWXYIIANEPVALFGTFGGNFGIXSFILGITILAWXXSMGDLVXNVALXMDGDNGVQIAFLLLCSPLSTHCGWVSHAARLVKSLLILIQRYTCLT

SEQ ID NO: 116839 - protein, 53 aa, Gossypium hirsutum
  Clone ID: AI055373.1.pep
SEIPCQDAGNSPEFTALEIISPIPVQVGQNLEVEFHPITVSLVSFLTQAIKPI

SEQ ID NO: 116840 - protein, 186 aa, Gossypium hirsutum
  unsure (1)..(186): unsure at all Xaa locations
  Clone ID: AI055372.1.pep
MGGGREFAISLDGVRDKNVMQLKKLNTVLFPVRYNDKYYADALASGDFTKLAYYSDICVXINCLSAWRKXKGGPFRVYYMNXGXLAPYSGLGIGTRXLNHVXEPLFEAKHPXITWIGQTTMDDAXXFIKXXGFEITRQSRLLHNIDLLMLSYQLILHLSEHSGNWQSHPCYEIMILSGGIIVIDLN

SEQ ID NO: 116841 - protein, 130 aa, Gossypium hirsutum
  unsure (1)..(130): unsure at all Xaa locations
  Clone ID: AI055370.1.pep
ESPISLKVGKNEISLLSMTVGLQNAGGLYEWVGAGLTSVKIEGLKNGTMDLSMSRWTYKIGLQGEHLSIYKXXGLNSIXXVXTSEPPKNQPWTAQGXWGDSPLGMNXLALNMIHWEKALLGIKKYGNNLP

SEQ ID NO: 116842 - protein, 147 aa, Gossypium hirsutum
  unsure (1)..(147): unsure at all Xaa locations
  Clone ID: AI055365.1.pep
NDVLVSFLKTFTKDDDLELFSRVLQIHLNRNRVEQFSKQSRDNETPEQSLVRLTLEHPQYLVDYAFPVVDEGWIGIKPPKKSRALKSNAMIAXXCENGSLXMMELKINEXCAXXRDLQVXNHELIKPTRXVADYXTGDLGIAAGTGL

SEQ ID NO: 116843 - protein, 221 aa, Gossypium hirsutum
  unsure (1)..(221): unsure at all Xaa locations
  Clone ID: AI055361.1.pep
QKLWKWPRNEQNPSGKATANVVPQHWQPNSGLLMTNDVTGVNLEEAVPCIALSKNDSYVMSATGGKVSLFNMMTFKVMTTFMSPPPASTFLAFHPQDNNIIAIGMEDSTIHIYNVRVDEVKSILKGHQKRITGLAFSTSLNILVXSGADAXLCLWSXDTWEIRXSVAIQFQLNXAPTGDTRXQFHFDQXRMXVVHETXLAIFDAXRMDAVDSDSTEVCMPH

SEQ ID NO: 116844 - protein, 172 aa, Gossypium hirsutum
  unsure (1)..(172): unsure at all Xaa locations
  Clone ID: AI055358.1.pep
GGLVVLSHLVLFLGFLVDTSSSHGKRRRHRSNRRDRDRDSLKIRKKSRSLGKRRRKKHSRHSSDSYSSSDSDSSRSNSSSDSDNESSHSKRHKKSERQKKSKEKERTXSYRHRRQKTNGGRPLSLLLHHASFLTSVNMDVYLSVISDCAFWDWVGLAISVGLVKVLYLVNSL

SEQ ID NO: 116845 - protein, 123 aa, Gossypium hirsutum
  unsure (1)..(123): unsure at all Xaa locations
  Clone ID: AI055354.1.pep
PKDQEGMGFRDIGKFNITFLLKQGCVLIVNPDSXAAGFFKVNNFRHIGFGSVHLGTTPSYVWRGIFALRRFLEDGAGWRVGLGINISIWRDSWLSIWVGGIRNTVVNNIVSMVVNLIDHNSKS

SEQ ID NO: 116846 - protein, 192 aa, Gossypium hirsutum
  unsure (1)..(192): unsure at all Xaa locations
  Clone ID: AI055351.1.pep
LDNMAHRLTHRRSLPAPEPNPSSHPLDPTLKKSPKPTITTHPTTRSSDPLMASKKPFFITNRFSRLSLNHKTQKPTNTQHSRDIHLQAKALTVSADADSSIFSLIKANHLLAHEKAKESLKESVRKASKDLGRKKQQQQQQQHHQSSVLHSKKLAXTVKEKQLKKRDEGHDNDDMKKGSSSLGRRRSLAVHK

SEQ ID NO: 116847 - protein, 199 aa, Gossypium hirsutum
  unsure (1)..(199): unsure at all Xaa locations
  Clone ID: AI055350.1.pep
MSAIKNQRGKICILSIDSGGMRGILSGKALAYLEHALKSKSGNPNARIADFFDVAAGSGVGGIFTAMLFATKDNSRPIFTAEETWRFLAENGKRMYRSGKGKNGGILNKFFKNGSTGPSSTGLEKAGEETFTADGRSLTLNDTLKPVLIPCXDLSSTAPFLFFEADALXTDSFDFXLWGGCRATSAEPGFFDRSDASVN

SEQ ID NO: 116848 - protein, 214 aa, Gossypium hirsutum
  unsure (1)..(214): unsure at all Xaa locations
  Clone ID: AI055336.1.pep
AAEFAAQKLEKNILDQVITRRDNTAVMDAVKQGYLKTDAEFFKEDNAGGTCCLTALIQNGDLVVSNAGDCRAVLSRGGRAEPLTSDHRPSREDERSRIQNLGGYVDLCRGVWRIQSSLAVSRGIGDRHLKQWVIAEPETKIVSIEPDCEFLILAXDGLWDKVSDQEAVDIARPSFIGTDKPNLVFACKKTRDLSVSRGSFDDISVMLGQSGYYI

SEQ ID NO: 116849 - protein, 54 aa, Gossypium hirsutum
  Clone ID: AI055327.1.pep
EYITLQYFWAAVKNIGFHNIKIQFKIFIQFSISLLRLCYVFSEYYYFSLSNKLI

SEQ ID NO: 116850 - protein, 163 aa, Gossypium hirsutum
  unsure (1)..(163): unsure at all Xaa locations
  Clone ID: AI055325.1.pep
KVKSSEPIDGDSLNLLPIQSDSKKKLGDSESKPSDPYPPSSSPILELYLSRRKGFVVSFLPKPRYDHSINRSRNKKVRGXLEVIFNCTNMVHNQSENQFIFPFCLEFFDYRQRVPFQEKTQKTHFRRKNHSPFAYPCFNHKGIDNIFKKISTHPYNFTLRISS

SEQ ID NO: 116851 - protein, 190 aa, Gossypium hirsutum
  unsure (1)..(190): unsure at all Xaa locations
  Clone ID: AI055319.1.pep
YYHFQMLRQKRWDLRTADVILQNKEGDKQMEATSAIEDLKNMDPVVNGKYSIWRRDFENPNSDSTLKLMRDQIIMAKAYANIAKSRNQIDLYSSLLRHVGDSLRVIGDANSDSELHPSSLDQAKAMGHALSFXKDRLYDCHIVARKLRAMLQSAEDNVNSLKKRXAFLIQLAAKLXQTMHCYFALARHTS

SEQ ID NO: 116852 - protein, 132 aa, Gossypium hirsutum
  unsure (1)..(132): unsure at all Xaa locations
  Clone ID: AI055317.1.pep
ETKDTLATPEELAPFKGHSSRLAALDYTVCLHSEVFVTTQGGNFPHFLMGHRRYLFGGHAKTIKPDKRKLALLFDSPHIRWETFRRQMKDMLRHSDXKGGELKKPSGSVYTFPMPDCMCKQTEAAANESSLS

SEQ ID NO: 116853 - protein, 172 aa, Gossypium hirsutum
  unsure (1)..(172): unsure at all Xaa locations
  Clone ID: AI055314.1.pep
SNSTAESLALLDWKVNLQSLTNRSVLPSWTISPRNAEASPCSWFGVHCKGDSVYRINLTSYGVKGTLHGFPFSSLPNLEELDLSINGLFGTIPPQINQLSNLTYLDLSYNQLSGKIPPQIGQLIHLRTLXLVQNLLNSSIPEEIGQLKSLEELALQNNYLNVPSLLFGNLAT

SEQ ID NO: 116854 - protein, 141 aa, Gossypium hirsutum
  unsure (1)..(141): unsure at all Xaa locations
  Clone ID: AI055288.1.pep
IGSIASFQEVVGDARAQVLNMTCSSEKENNRTLFVPNFISLMETISDLMRQFGFGTAVSGSGPDANYGLAQCXXDLSLLDCPLCYAEARTXLPQCYPYNGGXRVFLDSLLMRSGEYSFYAEYFGPTDMVLCGIASRRGIEL

SEQ ID NO: 116855 - protein, 153 aa, Gossypium hirsutum
  Clone ID: AI055287.1.pep
AISNSESCAQFGCADAGDLTGPAQSNVWDSMVPSKKRTCVNRPKPSSVEKLTKDLYTILHEQQSSYFSGSSGKDLLLESETPMVSVEIGWESVLIRHPSSIAREEESEASSLSVENRQYSRNEAYSYSSSFPACNDSKAIKFLGLEWKGLKLF

SEQ ID NO: 116856 - protein, 159 aa, Gossypium hirsutum
  unsure (1)..(159): unsure at all Xaa locations
  Clone ID: AI055280.1.pep
QVAKFLKSKTNIDRIKIFDTNPDILKAFAGTGISVTVTVGNGDIPSLAKLPGAKAWIEKNILPYHPKTIIXTXAVGNEILXTSDKTLIAYLLPAMKALQIGSRLGYVXRXKVSTPITRDIVYIGPRNSEVTIAHFGPFWSSISNKSLHGEPPDGFKHKR

SEQ ID NO: 116857 - protein, 185 aa, Gossypium hirsutum
  unsure (1)..(185): unsure at all Xaa locations
  Clone ID: AI055273.1.pep
HIEICVKSSSTTESMVNYLCQQCEASLQFLQLLCQQKPFRERLLKNKELCGKGGILFLAQSILKLHAPDFAESSAIVAALSKLKAKVLSILLHLCEAESISYLDEVASSPASLDLAKSVAFEVLELLKTGLSKNPKHFSASSDRTYSMGLXQLNAMRLAGIFXDDSNFDHTYWVLTEFMTQIFTL

SEQ ID NO: 116858 - protein, 102 aa, Gossypium hirsutum
  unsure (1)..(102): unsure at all Xaa locations
  Clone ID: AI055271.1.pep
LMKLRQFSINGTWRFTRTIRKFSCXPLHSPKSIPILEPTKNPHKXIKNQPWNRTKNKSTGSMQGNKRXRSFFLLNERKRLEYXILDHQRTFRPELXLMTYGQ

SEQ ID NO: 116859 - protein, 190 aa, Gossypium hirsutum
  unsure (1)..(190): unsure at all Xaa locations
  Clone ID: AI055267.1.pep
ANQKPSSLAMVQPSTVQVTQNKAAITESDDSGGRILSKRSIHDIVNQIDPSEKLDPEVEDILVDIAEDFVDSITTFGCSLAKHRKSDTLEAKDILLHLERNWNMTLRDLVVNEIXTYKKPLTMEVHIEQLAVIKKSILASDATNAKHIIGQTAGNTKVNVGKMAAYIWGFPMAKSDKFLEASFMFLHPLS

SEQ ID NO: 116860 - protein, 142 aa, Gossypium hirsutum
  unsure (1)..(142): unsure at all Xaa locations
  Clone ID: AI055262.1.pep
IPSKSLITIQETTWILISVFTYRXYYFYRKLWSYQIPSKIKMXYXGFHGTISPLXQPQIXRVLVNTKCPRCECEEESSRHIFQQYPESLAKETKSSCDSSAADYGTSFTLLTVISRSSKGEKQQFSLMQRLIARRPHRHRGY

SEQ ID NO: 116861 - protein, 54 aa, Gossypium hirsutum
  Clone ID: AI055258.1.pep
FGKIMEFVGCHGLNLINLIYPINFSPGFRSFYGIIRDILLSIIFIWPSLGTLTC

SEQ ID NO: 116862 - protein, 189 aa, Gossypium hirsutum
  unsure (1)..(189): unsure at all Xaa locations
  Clone ID: AI055257.1.pep
IVDVCQGQYKSTLVCPVCNKISITFDPFMYLSLPLPSTITRTMTVTVFYGDGSGLPMPYTVSVLKNGFCKDLLLALRTACCLKTDENLLLAEVYENKIYRYLEMPLEPLASIKDDEHIVAFRIQKKGMEKTKLVIXHRWQEKSTTDYLKSGKELFGTPLITYLGEDQPSGADIELLFLKYCHLSECFFS

SEQ ID NO: 116863 - protein, 117 aa, Gossypium hirsutum
  unsure (1)..(117): unsure at all Xaa locations
  Clone ID: AI055256.1.pep
RGQFGLLYWELSDEETRSHVVFREILNTPPIQSKNPKIAFLFLTSGTLHFEPLWDKFFRGHEDRFSVYVHASREKPVHTSHYXIGRDIHRETVLKREGKKKKLFKDARLMIPPFVPN

SEQ ID NO: 116864 - protein, 202 aa, Gossypium hirsutum
  unsure (1)..(202): unsure at all Xaa locations
  Clone ID: AI055255.1.pep
TQNIYINNCVIGTGDDCISIVSGSKNVHATGITCGPGHGISIGSLGAENTAAYVSNVIVSKATLSGTGNGVRIKTWQGGSGYAKNIKFQNILMYNVSNPIIIDQNYCDQEKPCRKQTSAVQVSNVLYQNIRGTSASNVAMKFDCSQSFPCRQIYLXNVALKAEETXQASSSCANGILSYRGDVSPPCSSQSLIGRNIYCLLL

SEQ ID NO: 116865 - protein, 186 aa, Gossypium hirsutum
  unsure (1)..(186): unsure at all Xaa locations
  Clone ID: AI055252.1.pep
MDSFLLESPNSISSSESSFGSPEFSPFNHNSLPFNENDSEEMLLYGLLTEVKTETSSSTEKGSPTKEKSYRGVRRRPWXKFAAEIRDSTRHGTRVWLGTFESAXAAALAYDQAAFAMRGSAXILNFPVERVXESLEGMKCXQEEGLSRWWLKRDTFMRRKRPVEVEGKRCDKHVMVMKIKCYLDTL

SEQ ID NO: 116866 - protein, 172 aa, Gossypium hirsutum
  unsure (1)..(172): unsure at all Xaa locations
  Clone ID: AI055250.1.pep
VPSDTAVSLAVNVLQLRFLESYSLDIQGTPLVQFIGNNLFLKVSHRTLGGAMAVSSTLCWEIVQVDCLETEGNVVHNNGTLVDSVENGSLVTGNGFSPLRAVFWVHNKQKCLSSGKASVIPFLDISIVHVIPFDERDXECHSXSVSAGISGVRLXGGMNILKXXLHRFGIWA

SEQ ID NO: 116867 - protein, 207 aa, Gossypium hirsutum
  unsure (1)..(207): unsure at all Xaa locations
  Clone ID: AI055249.1.pep
VSTPVYIPQSSDRIEPNSVQSDIPFGMVDRNIMLNASQWMDKSQRDGTRSMHLDHSSSLSEIQNLNLYKSLYNGSREHFSNEFPSCTSGRQSQCVLADEFPHLDIINDLLDEEHNVGSICRTGGFHVLSNGSHLLSSHFSFPSNLGMSGEMGSSCGSCKFEQARSYHDDGLQLKFKSSSCNPYDSPWELLPNKRSTFTIGQIMAGSX

SEQ ID NO: 116868 - protein, 123 aa, Gossypium hirsutum
  unsure (1)..(123): unsure at all Xaa locations
  Clone ID: AI055246.1.pep
PKCKSRVILFLWLLGIIALLNGSAVEARIRRYKWEVKYEYKSPDCLKKLVITFNGRTPGPTITAQQNDTIIVELTNSLLTENVAIHWHGIRQIGTPWFDGTXRVTQCPXLPGTTFKFQLLSTE

SEQ ID NO: 116869 - protein, 105 aa, Gossypium hirsutum
  Clone ID: AI055243.1.pep
TMAEEFQAAICGGGGGTWWNIPTKTMFSGCNSPLYSTTIADMGSFGWGNDMVATDDIIIKPRSCYNSDNSGTNNNSWILIDSTLGLGLLSLVYLEPISCYGVINL

SEQ ID NO: 116870 - protein, 210 aa, Gossypium hirsutum
  unsure (1)..(210): unsure at all Xaa locations
  Clone ID: AI055239.1.pep
KSKKERHSTSFGTGFFAGCTAALILALVLIIHARNILDKEGRVQYMESMFPVYSLFGFMVLHMLMHAGNIYFWRRYRVNYSFIFGFKQGTELGFREALFLSFGLATLALXXVVSNLDMEMDPKTGDYKALTELLPLSLXLLVIIVLLCPFNILYRSSRFFLLRTXVXVICAPLYKVXNFKFLLADQFTSEVQHXKCGIYIAIWWGDFNST

SEQ ID NO: 116871 - protein, 51 aa, Gossypium hirsutum
  Clone ID: AI055238.1.pep
ELGYPDNDFNKSGPKPTTFSGQRALDFVLRNQGLIDKTLLFDIELLKIIPN

SEQ ID NO: 116872 - protein, 213 aa, Gossypium hirsutum
  unsure (1)..(213): unsure at all Xaa locations
  Clone ID: AI055232.1.pep
RLHMLPEGKSGGHATPTKKSGSVMRPTSPKSPVASASAFESMEGSEDEDNMTDNSKIDLTYLHTNGNAGPNLPDHINANGEAIQIAASSIIRSHSVSVDLHGVPPDPIAADILRKEPEHETFARLNISPTEVPSPDEVDVYVVLQECLXMRIRYVFKEAVAPCEIEVISDPSTPXPNPAPFFYAPEVXSDHYFEMQDGVIHVYAIKIHRRALS

SEQ ID NO: 116873 - protein, 204 aa, Gossypium hirsutum
  unsure (1)..(204): unsure at all Xaa locations
  Clone ID: AI055230.1.pep
MVDDSENSSKVKETAGNNCNEDSEDLSQVVDSSGLEDVVSGRRSTVGESPMVDDSENSSKVKETAGNNCNEDSEDLSQVVDSSGLEDVVSDRRSTEGESPMVDYSDRPSRDQNHQTLVSSDSDSEGDIDXSEINCEDDSPGETESSDSNNSDEDXXIPLFASEITEXXNIDKDDYSSAFRIKSQNPMRMKILPHAENHRDAVRH

SEQ ID NO: 116874 - protein, 118 aa, Gossypium hirsutum
  unsure (1)..(118): unsure at all Xaa locations
  Clone ID: AI055227.1.pep
KKKKQSESENCYKVIKGSWKKIEDTGKQSGGLELLRKSFRICXALASWLETAFAYTAMTDYPTPSNFXNPMPAYPVKQMCXAIDDPKSGNDTXAKVYGCSXFYYNYSGTASVSIWLIL

SEQ ID NO: 116875 - protein, 126 aa, Gossypium hirsutum
  unsure (1)..(126): unsure at all Xaa locations
  Clone ID: AI055226.1.pep
VITKKEERYAVXLXMSRATIXVEWTFIKEIMLKMRFDTNWVAALMKCISTVSYSVVINGHNGDKFFPTRGLRQVDPFSPFSILLYVEGLSSLLLLAMNRSFFXGVRVSNGPQVSHLLFADDCILFG

SEQ ID NO: 116876 - protein, 146 aa, Gossypium hirsutum
  unsure (1)..(146): unsure at all Xaa locations
  Clone ID: AI055225.1.pep
VFAVMEETEALDLLEESWFFENLLDRRRRMSRCYSDPCTSSNFRQDVLSNDSCNNNQSSNGLVRAPSLPPCIGRGEQVEAKKNHXWEDQIEQAIIIASIEDERRRRRQQHVLIIRQRRLIENHHYRDIVCKEHLLCLLQWRPKSVI

SEQ ID NO: 116877 - protein, 129 aa, Gossypium hirsutum
  unsure (1)..(129): unsure at all Xaa locations
  Clone ID: AI055223.1.pep
VIWGKVSIVSLHPRVAXTKNGIGTQKFWQMFFRKFGNQPPXYFINCPEAKTQRFLISXQYLYSSNRTRHCNKXQQNATLRTQVHDIQAELTRKPKELLKLNLASKSKPRLRIARAIGKMKGPXNXTYNA

SEQ ID NO: 116878 - protein, 131 aa, Gossypium hirsutum
  unsure (1)..(131): unsure at all Xaa locations
  Clone ID: AI055222.1.pep
MDFQVVVLAGGNSKNLTPLVSKELPKPLLPVANCPVLNYVLHQLEQSNLKDLIVVVEGEDAALLVGAWISGXSLIVHVEIAAVPEDIGTAGALRAISHHLTAKDIXVVSGDLVSDVPPGALAATHRRHDEQ

SEQ ID NO: 116879 - protein, 103 aa, Gossypium hirsutum
  unsure (1)..(103): unsure at all Xaa locations
  Clone ID: AI055220.1.pep
PQSPMHTKSLATLKHQLLRNRIVETARKCMHNNASLGQVYDSMQEAYQQMQSPLVYQEPSSRGLKELKESTIQMASTMGSIDAPVDETVXDVEKGIDDLLPTR

SEQ ID NO: 116880 - protein, 158 aa, Gossypium hirsutum
  unsure (1)..(158): unsure at all Xaa locations
  Clone ID: AI055217.1.pep
RNIIKSLYWAIRAIIDDLYXFTXPSYRKQKKDSKRLNNFMFFSVXHFSYLLFYLFVQIFXISLNXNNNKGERNHLNRTGTPPLVSSPSWDPNAGRGKGPLFLRFQALRTRLLNVLQSAGRGGIFARRRPPNTVALRRRTWPDLGGKFEKKKCCFFKFF

SEQ ID NO: 116881 - protein, 252 aa, Gossypium hirsutum
  unsure (1)..(252): unsure at all Xaa locations
  Clone ID: AI055215.1.pep
VVSNTLAIIFVAFQIFHVRKHRGIGPMVSLLMLVILALGHFIPLVLNLEMNEVIIRVVTMVAFLLQVRLLMLSWTARCSTEKKKTLWIAEKRXXYVCVPVYVIGAIIAFSVKSRQNLHRTVRATHSWYYIDEIIXGNSRAYAGLILDAXLFPQIIFNMFHNSRELAXSRLFYIGITLVRLVPHGYDLYRAXSYVDIDDTYIYADLVQILLNCLDLIIWGYPLWTSLPALARFPSEYPNREMRTSCTCLNLPF

SEQ ID NO: 116882 - protein, 140 aa, Gossypium hirsutum
  Clone ID: AI055209.1.pep
MAKGSKGRRGIAFRQVRPTPYSFTSRNENISGDLYPKKCSKALGKNDWEDATCSVCMECPHNAVLLLCSSHDNGCRSYMCGTSFRYSNCLDQYIKFYTKVVSSNEEEPVLSSLDLRSGTRFWAVSQECEVPNSRVTCEGK

SEQ ID NO: 116883 - protein, 109 aa, Gossypium hirsutum
  Clone ID: AI055207.1.pep
QNVVLMCSDQSRSFLNQANDKTTYGAFLDVDPLHQSLSLRSLNDHSIVESFGGGGKACMSARVYPTLAINNAAHLYVFNNGSESVEISKLNARNMYKAIIYSNSWFQNL

SEQ ID NO: 116884 - protein, 150 aa, Gossypium hirsutum
  unsure (1)..(150): unsure at all Xaa locations
  Clone ID: AI055206.1.pep
MASRKLVRDFLIARQPLFHRLTTQQGSNVRLRLLSGKGYSRNRQFSVFNEFSKKIKGEANRNQDFKQSVEELXGKAEELXVRTKXTXEQLYKQVDGVWTGAEAQLKRFCNVKGRFSCQREVRETSMRETVDVLSTVLCDEATYSRTMTAL

SEQ ID NO: 116885 - protein, 88 aa, Gossypium hirsutum
  Clone ID: AI055204.1.pep
AKSKRSLNFGMRLRIALGSAKGILYLHTEAHPPVFHRDIKASNILLDSKLNAKVADFGLSRLAPALEDEGAVPDHVSTVVRGTPVSLL

SEQ ID NO: 116886 - protein, 186 aa, Gossypium hirsutum
  Clone ID: AI055199.1.pep
AKHLHFHLIDEDDIIPTSQHSLPSSSAAAVAESKTLNSFFELVIQIAKTIRLNQGLIISTKLSHSSLIDDLKQLAGTADERLVIVQCIEAQDASYRYQFEGVHVFTVDPKRFDANNLLAEMSSKVAKRNSTHLHALSLYNNYQPFTEFGKGLNAKGALNSFQALCINALSAMNTFSTNLALKIPVI

SEQ ID NO: 116887 - protein, 84 aa, Gossypium hirsutum
  unsure (1)..(84): unsure at all Xaa locations
  Clone ID: AI055196.1.pep
LQVHKQGSLVGRAIDLSRLYGYKDLITELEHLFGMEGLLXAPDKGWLVLYTDMDNDVMVVGDYPWHEFCEWYPRSTFHRIQIDK

SEQ ID NO: 116888 - protein, 44 aa, Gossypium hirsutum
  Clone ID: AI055192.1.pep
IFCLFNFQIVLFNLILERILIGLLIAFYFNQNFRQYFISDDYRY

SEQ ID NO: 116889 - protein, 214 aa, Gossypium hirsutum
  unsure (1)..(214): unsure at all Xaa locations
  Clone ID: AI055191.1.pep
KYLKKKTYQASLISKGESQLSFEGNQDIQSQGYSASEYRIDEVAIQRDEGQNITSPGTETCSTNQPGILKNKLVDEVMVSDEDRKSRVLKIKSNKPLDLDSGDDKHDSKSNTLKAXKLVINLGSRKINVTNSPKPDASNCQRERDVISYMVFKMQINRVQSLCWIRMTILLNLVMDTRFISPSQEGAGEMISEILSQNLLNWPRSSLMDINWPL

SEQ ID NO: 116890 - protein, 206 aa, Gossypium hirsutum
  unsure (1)..(206): unsure at all Xaa locations
  Clone ID: AI055188.1.pep
MSICFSQNVLLVTLLLAIAVSLVESQGTRVGFYSTSCPRVESIVRSTVQSHFGSDPTIAPGLLRMHFHDCFVHGCDASILIDGPGTEKTAPPNLLLRGXXVIDDAKTQLEAACLXVVSCADILALAARDSVVLXSGPSWAXPTGRRDGTVSQAFDCGNXPGFLXIDVQNKNCSKGSNTKILHPCGGHTIXTTACQSSDQLYNSHER

SEQ ID NO: 116891 - protein, 154 aa, Gossypium hirsutum
  unsure (1)..(154): unsure at all Xaa locations
  Clone ID: AI055182.1.pep
SCXGVHLSAKRLGCNAVIAMPVTTPEIKWQSVERLGATVVLIGDSYDEAQAYAKKRAKEEGRTFIPPFDHPDVIIGQGTVGMXIVRQMQSPLHAIFVPXVGGGGLIAGIAAYVXXGFPEVKIIGVEPFDANAMALSLHHGERGMLRKVGGLRSL

SEQ ID NO: 116892 - protein, 231 aa, Gossypium hirsutum
  unsure (1)..(231): unsure at all Xaa locations
  Clone ID: AI055177.1.pep
EVKKLLKKDSTMFMPILCRRHPHATIVSASLLHKFYGNKLKPFVDSAEHLTEDVVSVFPAADNLEQYILDLIKSACEGENVEIHFRKLNPYQIESVSGTVVMRWINSQLGRIVGWVERTLQQERWDPISPQQRLGSSIGEVYRIVEETGIQFFGIKVPMRLTELNALFRGIDNAXXVYANHIVDNLASXDDLIHYCLTRIERAELKRVRTIALCDQEVIILLHAPWVHYIA

SEQ ID NO: 116893 - protein, 137 aa, Gossypium hirsutum
  unsure (1)..(137): unsure at all Xaa locations
  Clone ID: AI055170.1.pep
XMTFDTGIGWHEGFRLIXLLHVSFDSSXCLARHSXXXSLLXRLSRSQLFRLVKDRSGFHTSXFFHKSMRFNVCFCSIKVLVGIFSTNRSLLVDDNFLFSXDHHNGFLMHHMSRFLIHHTVMPWNSASNKISPAGLFL

SEQ ID NO: 116894 - protein, 68 aa, Gossypium hirsutum
  Clone ID: AI055169.1.pep
IKVFLLKFIFSGYVYFNSGLNFIGTWVLESLIVWQVNFGESASHSPQIHLALIQCNGDAGIYECNFCL

SEQ ID NO: 116895 - protein, 226 aa, Gossypium hirsutum
  unsure (1)..(226): unsure at all Xaa locations
  Clone ID: AI055168.1.pep
MDISMKKLNISFFILLQILFFFLLNFISCELLVIRESLKKNNLSAVPSNFLFGTASSAYQYEGGFLADGKGLNNWDVYSHKPGNLIVDGSNADIAVDHYHRYLEDIDLMHSXGVNSYRFSISWARILPKGRFGEINEAGIKFYNNLIDGLLLKGIEPXVTLTHXRFPQELEDRYGSWLSPESQEDXAYFADIWVKSFGDRVKYXVPVTSPIFKSWVPVSIFHRCMF

SEQ ID NO: 116896 - protein, 129 aa, Gossypium hirsutum
  unsure (1)..(129): unsure at all Xaa locations
  Clone ID: AI055167.1.pep
QSSSDSEGSQPSTSVVALTKFLTDIMDEFGEKRKSSCGIGPVAFIASVQSLESIPQSLSSSGRFDFHVQLPAPAASERGAILKHEIQRRXLQCHDDIIXDVAXKCDGYDANDLEXLVDXTXHAAVAFCL

SEQ ID NO: 116897 - protein, 90 aa, Gossypium hirsutum
  Clone ID: AI055165.1.pep
HQNCRSSTGSKLIIFCVCFMLNICRGKSLLFPFIEALFLWCCVIYRLRIKNQEMIWMQKTQELQKKWNCHGSQFKIDDYCTKYVLKRLLS

SEQ ID NO: 116898 - protein, 191 aa, Gossypium hirsutum
  unsure (1)..(191): unsure at all Xaa locations
  Clone ID: AI055162.1.pep
PASSSSPASVFSEKVGTSSSPFGASSGSTLFSSSPAATSSSFGFSFLGGSSFGKSTESSTTTATFTTAPSLTAASSSSSSSSGFSFSLPSSASQPTFGIGNAASSSSSSSASTVPGTFGTSSSPFGASSGSPLFSSSQAPATTTTTTAAMSSFGSISSPSTATATTPSXSSLSSSSSASYTEFSIEGSSPF

SEQ ID NO: 116899 - protein, 211 aa, Gossypium hirsutum
  unsure (1)..(211): unsure at all Xaa locations
  Clone ID: AI055158.1.pep
VAEAFSKAGQNLXVENGLTEGVVQGPLINEAAVQKVETFIQDANSKEPKVLLGGKRHSLGMTFYEPTIVTDVKSEMLLASEEVFGPVAPXLRFXTEEEAIHMAXNTXAXLAAYIFTNNVQRTXRVSKALEYGLXXXNEGIIXTXVAPFXGCKQSGLGRXGSKYRIDDILPGILCLGDXNRIEKGNMHSTALFKPVWSMSAPGIGNLKDLLR

SEQ ID NO: 116900 - protein, 173 aa, Gossypium hirsutum
  unsure (1)..(173): unsure at all Xaa locations
  Clone ID: AI055157.1.pep
SFTPQAEKALEWKDYLSLFYVSEEEASALWPSICREQVLDYMKKSEVVIKQLLQVLMKGLIVNEIDEAKESLLVGSMRTNLNYYPKCPNPELTVGVGRHSDVSTLTILLQDEIGGLFVRGNEGDDWIHVPAIKGSLVIHVGDALQIMSNGRYXSVEHRVVAYWSXNRIPVPIL

SEQ ID NO: 116901 - protein, 158 aa, Gossypium hirsutum
  unsure (1)..(158): unsure at all Xaa locations
  Clone ID: AI055150.1.pep
GAEGSSGSVLGGKQDIDFSSGVSSDTGSEEEKEVVLHRSSESCEDVNAMVEADVIAGSEAAHPEMPEQNGTKTENQEEIVSQCLSAPVAENGVGSELIDEVNCSSILKPEVHKDALVSNVNATEPENPLNFDDXYSSAEMEVWLLTGVLFLFPTLSXI

SEQ ID NO: 116902 - protein, 57 aa, Gossypium hirsutum
  Clone ID: AI055148.1.pep
QLRPCIISNGSVHSIFSYGAYSGLHCDEEIADLVQTTSTASLLLIIVALNLTINIFC

SEQ ID NO: 116903 - protein, 138 aa, Gossypium hirsutum
  unsure (1)..(138): unsure at all Xaa locations
  Clone ID: AI055139.1.pep
VKSWRPNYIIDFSDLSIGDPLYDVIPIHLDVFRGNSSLLKKFLQSYKLPLMQKTPENRSITANDKFGRLSYQAMCYCILHNENVLGAIFSLWTELQTAETWEXVEXMVWGELNNYQGVACHVTPTPNLYGIMHILFDI

SEQ ID NO: 116904 - protein, 68 aa, Gossypium hirsutum
  unsure (1)..(68): unsure at all Xaa locations
  Clone ID: AI055138.1.pep
ISDQQSSFFPPQNYRTXXKEVLKFNQHLVKQTSFRQFPQTGXVDSPKIQXPAQKRERKKNSKFSIKNQ

SEQ ID NO: 116905 - protein, 85 aa, Gossypium hirsutum
  Clone ID: AI055137.1.pep
HPPSSKHQTTTPTTINDAAPSIHTTKLKMLLRRFKTPNIGTFQTPIIDDPQNPKLSSCLAQPPCVATTPNPNIGTVIAMVEQEIK

SEQ ID NO: 116906 - protein, 128 aa, Gossypium hirsutum
  unsure (1)..(128): unsure at all Xaa locations
  Clone ID: AI055127.1.pep
MDDSVSPKLASDDSELNPTDTQSSKRRKVVEKIVVTLKVGENGGKLKSEGPLSDLWSWRKYGQKPIXGSPYPRGYYRCSTSXGCSAKKQVERCXTDASMLIITYTXSHTIQVLIFTAPTNSPLKNPKP

SEQ ID NO: 116907 - protein, 183 aa, Gossypium hirsutum
  Clone ID: AI055122.1.pep
EDFKLINYIAIHGEGRWNSLARCAGLKRTGKSCRLRWLNYLRPDIRRGNITLEEQLLILELHSRWGNRWSKIAQHLPGRTDNEIKNYWRTRVQKHAKQLKCDVNSKQFKDTMRYLWMPKVSRKISSLRRFDPHNHFYHRGSSPPPLVWARLFDTGNPELYFGDSSTATALRRSHSRPSFAVSD

SEQ ID NO: 116908 - protein, 116 aa, Gossypium hirsutum
  unsure (1)..(116): unsure at all Xaa locations
  Clone ID: AI055121.1.pep
MATTGVQNQEKVPMNLKQQLALAVRNIQWSYGNFWSISAKQPGVLEWVMVYYNGDIKTRKTVQSFEPKADDQLGLXRSEQLRELCESLSAGETSXHTKRTSVALSPEDXTATDWHI

SEQ ID NO: 116909 - protein, 44 aa, Gossypium hirsutum
  unsure (1)..(44): unsure at all Xaa locations
  Clone ID: AI055110.1.pep
KAFFVFIFKIGYQHRACLSSNLVNSRTXDFKIWIWIPKIMQVEF

SEQ ID NO: 116910 - protein, 144 aa, Gossypium hirsutum
  unsure (1)..(144): unsure at all Xaa locations
  Clone ID: AI055109.1.pep
KMKVKNCYFPLFVFPGVLQKEKDHIEGFAPEVAWVTKSGESDLEVPIALRPTSETVMYPYYSKWIRGHRDLPLKLNRWCNXLFEWEFSNPTPFIGSREFLWQEGHTAFXTKEEADXEVLXILELYRRIYEEXLAIPVTKAXKVN

SEQ ID NO: 116911 - protein, 97 aa, Gossypium hirsutum
  unsure (1)..(97): unsure at all Xaa locations
  Clone ID: AI055105.1.pep
SIIHSFLKKTPQPVLQDVQANWSTSIIFKNDHKIPIYPQMNLQLILRKKGIMCKIHQHNFILFSFMIGNAINSRLNALTHKTSVHNQKRTXRTQVFF

SEQ ID NO: 116912 - protein, 56 aa, Gossypium hirsutum
  Clone ID: AI055102.1.pep
QIVQNYLYQIIQMQQNDPNLSQISTIHPPSDELAKQKQTHKLLVQMFYPSFQFYQT

SEQ ID NO: 116913 - protein, 161 aa, Gossypium hirsutum
  Clone ID: AI055101.1.pep
KELIDLLAKHKNDLNGFKLDVYGNGEDAHEVQSTAKRLDLNLNFQKGRDHADDSLQGYKVFINPSVSDVLCTATAEALAMGKFVVCADHPSNEFFSSFPNCLTYKTPEDFVAKVKEALANEPQPLTPEQRYNLSWEAATKRFIEYSELDRILKTNIALQHI

SEQ ID NO: 116914 - protein, 61 aa, Gossypium hirsutum
  Clone ID: AI055098.1.pep
ASILPKDLSTKPKQTFCNMKLLNNACTAMLAPTGAKMLISHLTAYEFNFSFSFEMLISSDY

SEQ ID NO: 116915 - protein, 177 aa, Gossypium hirsutum
  unsure (1)..(177): unsure at all Xaa locations
  Clone ID: AI055097.1.pep
RVHTDYSFGFPVDLGASWLHGVSKENPLAPLISRLGLPLYRTSGDNSVLYDHDLESYALFDMDGHQVPQELVTKVGKXLECILEETNKVRQEHSEDMSISSAFSIVFERRPAFRLQGLAHXVFQWYVCXMEGWFASNADTNLLKSWDQEELXXGGHGLMVRGYLSGIDTLAKGIDMR

SEQ ID NO: 116916 - protein, 67 aa, Gossypium hirsutum
  unsure (1)..(67): unsure at all Xaa locations
  Clone ID: AI055093.1.pep
TLPYQCFKFFYGVFRGNVYGLXLISIVLLQIQEIAGANKDKEGPXNDVENIIRLISERSFLPENHSS

SEQ ID NO: 116917 - protein, 75 aa, Gossypium hirsutum
  Clone ID: AI055091.1.pep
LDARGKLGSAMFVLADFGRYPSEIANIEKDIIAPYRHVVRTIPSADSAPFDKRPILVFFQGAIYRKDVSFLPFMN

SEQ ID NO: 116918 - protein, 104 aa, Gossypium hirsutum
  Clone ID: AI055084.1.pep
KYLPNSPFIIILIYALLVLTLIVAEAMASIKMGYCIAIYLYVLLDFFLIRVRSITINCCGRHCSIVFFCHVFASLFLCSHCWRVSNLLYALKPTKAYDIGSIFK

SEQ ID NO: 116919 - protein, 51 aa, Gossypium hirsutum
  Clone ID: AI055078.1.pep
PLNQELVKKVMDMIQSSYHRDFVVDVDGHWMLQGWKGRIIYALSCWKPVKN

SEQ ID NO: 116920 - protein, 101 aa, Gossypium hirsutum
  Clone ID: AI055076.1.pep
HFRDTSRCQASYWYHKISKADLILNFTNGYTNITPKWIILLTINHPKSSIFGSFSELQTFEMMFNPAPMLNSQSNNKSKLSVSEIKGFFNTMTMMYIYINI

SEQ ID NO: 116921 - protein, 65 aa, Gossypium hirsutum
  unsure (1)..(65): unsure at all Xaa locations
  Clone ID: AI055075.1.pep
FESSVPCERRDWKLQLANDLKPTKSINYQQICKANLGSFYSNAQGRPPEIHXWFESTITITQNLV

SEQ ID NO: 116922 - protein, 119 aa, Gossypium hirsutum
  unsure (1)..(119): unsure at all Xaa locations
  Clone ID: AI055071.1.pep
MKNSVSDHSFYIESDEEDEXKXFIPDENGEXSXDGEMNLMTQNSSAENQQQNKPGSYNTSWPQSYRQSIDLXSSVPSPSXGFLGTPTLSRLXSSYXSSSLTRRHTSRTLXXATKPLNPS

SEQ ID NO: 116923 - protein, 155 aa, Gossypium hirsutum
  unsure (1)..(155): unsure at all Xaa locations
  Clone ID: AI055070.1.pep
MNNRGRYPSVLGRGRGANANPSFQSRPEQPQYAQRNLVQNHHHFQQQQHHHHHLQQQQHQQQWLRRNQLPGGNDSTVADEXVEKTVQSEAVDSSSQEWKARIKMPPSDTRYXTRDVTATXGMNLRLXSERELLXGIYEKALKDIYQEEVSHCLTE

SEQ ID NO: 116924 - protein, 140 aa, Gossypium hirsutum
  Clone ID: AI055066.1.pep
KFSVWAYEEFEKGNIEGIVDKKLRSLDVDMEQITRAIQVSFWCIQEQPSHRPMMGKVVQMLEGITDIERPPAPKSATEGSISGTSINVSSNISAFSTSAVSAPAPSSSSSLHTVGISPLASGMISSEKQSSSLIQPDMKC

SEQ ID NO: 116925 - protein, 53 aa, Gossypium hirsutum
  unsure (1)..(53): unsure at all Xaa locations
  Clone ID: AI055064.1.pep
SFLFLKWYTISHISPMSLLPGQKLISSVTXPYVSVAGIEYEALPRSTKHLQII

SEQ ID NO: 116926 - protein, 133 aa, Gossypium hirsutum
  unsure (1)..(133): unsure at all Xaa locations
  Clone ID: AI055057.1.pep
MSYLLPHLRSGWAVDQXERLVVIRFGHDWDETCVQMDEVLASVAETIKKLAVIYLVXVPDFNTMYEFYDPXTVMFFFRNKHIMIDLGTGNNNKINWALKDNXEFIDIXETVYRGAXKGXCLVIAPKDTPPIPY

SEQ ID NO: 116927 - protein, 67 aa, Gossypium hirsutum
  unsure (1)..(67): unsure at all Xaa locations
  Clone ID: AI055039.1.pep
CIKXNITNLSXKKGQNIQLSREDGKSQKRAIKLPGSAMQHPTDLVTAYRRIKSIFIKAMQLIRKTMK

SEQ ID NO: 116928 - protein, 114 aa, Gossypium hirsutum
  Clone ID: AI055031.1.pep
GDYTEEDIIDFASWLGGSYVADAAKPFHGIMTIPLADVDNVDLRMSEKAHNEFVSKLLALYCIIRKAMEKHGHLSKTLRRPAEIIMGSFDGIKVHNYKLVLLTSTCFIDVSWKC

SEQ ID NO: 116929 - protein, 170 aa, Gossypium hirsutum
  unsure (1)..(170): unsure at all Xaa locations
  Clone ID: AI055026.1.pep
MAPSLSEPFSDSSVLIDFVINQGNGVKGLSEMGLKALPKQYIQPLEERMCMTNVQAQESIPVIDMSNPDDPEVKKVDLRSGFEWGFFQIVNXDVPIEVLENVKDATYKFXGLALXVKNKYSKDIPCQQVXVRTSFTPQAERHLMERLLSLFMSLKRSFALWPSLGQVLIF

SEQ ID NO: 116930 - protein, 109 aa, Gossypium hirsutum
  Clone ID: AI055025.1.pep
WLISRREFRLKASIICLLEAKETRFVSKEWTFLLGLGCFCAGMLFTDRMGTVPEPKGIKRTTAVEAEKLKLISEGCNPKANEEKHVSKHIIGEVFKTHHAIQSVFFFFF

SEQ ID NO: 116931 - protein, 63 aa, Gossypium hirsutum
  unsure (1)..(63): unsure at all Xaa locations
  Clone ID: AI055024.1.pep
SFLSLFLNDDSCLEIVLSAWRSNLIIKKPLFTMGLRPAHLIAXKCLLAPSTCVSALFDGHYEY

SEQ ID NO: 116932 - protein, 69 aa, Gossypium hirsutum
  Clone ID: AI055019.1.pep
VSSSVCSRPAMYGFLKSWWSFNIAMKQIKCNLNSSFELKYSTESSSLGNLCFQEMFPYLRIQSLCIFMY

SEQ ID NO: 116933 - protein, 64 aa, Gossypium hirsutum
  Clone ID: AI055018.1.pep
FLSLQICSFINACLLPQVFCCILLTFLKYFPRVNKTGLVSKIGKGFLSGVPFLIKRVIGTHIIF

SEQ ID NO: 116934 - protein, 77 aa, Gossypium hirsutum
  Clone ID: AI055016.1.pep
MRGIIYNGNEVLSDDETRRRHSRRPMTTDIASDASSDLFELDNLSAIGSNERYSEELPVYETTHLDTNRAIANGLIL

SEQ ID NO: 116935 - protein, 174 aa, Gossypium hirsutum
  Clone ID: AI055011.1.pep
PNKLMEDILKKKPCPAFECKTETLEHIDTDGLVYFEGLLEEQSFLSNLSILENNYNNATRNRGDLDEKLFINEEDSLLVFGSLSGRDVNISGIKKKFDSIASPSKTITSPLSPHCHRASHVNGVLGPLNGKVASTPVSTAMTTAKWLRTYICPLPSRPLSKLQLFLTYCDKMYP

SEQ ID NO: 116936 - protein, 126 aa, Gossypium hirsutum
  unsure (1)..(126): unsure at all Xaa locations
  Clone ID: AI055010.1.pep
KLPFIGHFHFLIFSLPHHRLTELAKRHGSLMHLXLGELSHIVLSSPEAAREVKKTHDINFANRPXSLNAEIIMYHFSDIAFASYGGYGRQLQKVSHWNLLSPNCVQSFRSKESRFQVYLDPSLILT

SEQ ID NO: 116937 - protein, 85 aa, Gossypium hirsutum
  Clone ID: AI055009.1.pep
INICPCHVFDMDLHELFLSPMPYIIWTYMAQSCLQSHISNMDLHGSFLFCPVNSNILTFLGFNRGFLTLFLCHSTLNSTLHIFIT

SEQ ID NO: 116938 - protein, 84 aa, Gossypium hirsutum
  Clone ID: AI055006.1.pep
CPIISRAQLNKIQCLKSKYTGPNQKLQAQISLNIGKSETLGSKLSRRNILATRPFAFPPRAPSFCVRTPSAGLRTPVANATNAK

SEQ ID NO: 116939 - protein, 115 aa, Gossypium hirsutum
  unsure (1)..(115): unsure at all Xaa locations
  Clone ID: AI055003.1.pep
AAARKRSRRHLAETDEXITTNNEPNFLDPVAMSTAYQKMTSLCMNIKNEIFTDIEIHKQDILPSFIDLPNLSASIYSTELCSNXRAFLLGWPPSGPSHLWRTLSLHSRFQRELSS

SEQ ID NO: 116940 - protein, 79 aa, Gossypium hirsutum
  unsure (1)..(79): unsure at all Xaa locations
  Clone ID: AI055002.1.pep
LEEXXFHIYIYIYTTHNFSSKFHHFLLYALHLGLYLLVENLVLSLYTSSEIFPSWYIFLLKGVCVAMDVVPLLRYGMES

SEQ ID NO: 116941 - protein, 60 aa, Gossypium hirsutum
  unsure (1)..(60): unsure at all Xaa locations
  Clone ID: AI055001.1.pep
FIASXHPPPSTSFPYINSVIYIYRNKLKQIIKEIVDLGSSLLILSIIYIFPLYKLLQKFY

SEQ ID NO: 116942 - protein, 160 aa, Gossypium hirsutum
  unsure (1)..(160): unsure at all Xaa locations
  Clone ID: AI055000.1.pep
LLWXPRGSQIGAGSMMITSXLNKKGYNAYTISIPSLDDLQTISGLAAPVFIMMMAKVAFYALIIYFATNMGTHTAAAHQVMIQTYCMCTVRGEXPLSQTAQSFMPELLYSINQNLPNARTLLKSLVIIGASLGLILGIIWTISXPGVFPNIFTFDRNVIH

SEQ ID NO: 116943 - protein, 212 aa, Gossypium hirsutum
  unsure (1)..(212): unsure at all Xaa locations
  Clone ID: AI054998.1.pep
RLGGAICLKVQKWIDLVSCXRPLKERKLLKXERXRALQEXXNELPRAAAKAEGTKASSAASKVVTSANTKPSKAAKSSSQKNDGSQVAASEKXKGDRAPEKDRKKDAPHPRMQYDDKSRVEKAKXRAVVKQTEARNRVEXLFRHXXQYEHGTQLPDLRLKFWNSIHAPAVSRLVGRLAGISWWHDVDWMFSVKSFKILLTGNSMNYCRYSRF

SEQ ID NO: 116944 - protein, 166 aa, Gossypium hirsutum
  unsure (1)..(166): unsure at all Xaa locations
  Clone ID: AI054994.1.pep
LQIKGTETPVKVLEQSTKLKKARVSEDVCDEIDSKETIELYGKWQXLEPLLLPRAVNGIVPKNERGQVDVWSEKCLPPGTVHIRLPRXXVVAKRLEIDYAPXMVGFEFXNGRAVSVYDGLWSXPEFKDAILXAYAEEEXRRAAREKKPPNTTISECINFLISLTNS

SEQ ID NO: 116945 - protein, 77 aa, Gossypium hirsutum
  unsure (1)..(77): unsure at all Xaa locations
  Clone ID: AI054984.1.pep
APSPYLQIKGVNKEAVAAAGSALKLDGSYTTKSYLQIILERLPLVERSYSGIHTHQAARLQELVESIQSXVFIVKQN

SEQ ID NO: 116946 - protein, 93 aa, Gossypium hirsutum
  Clone ID: AI054980.1.pep
HQQISIWSHPTSHVADLKLHLSKAASNWIAAFVLEHMDTFFRLGSTLGAFLISNNFSASEINKIRDIIPRYSPNSHCNFWGKPVIPIISCKSS

SEQ ID NO: 116947 - protein, 129 aa, Gossypium hirsutum
  Clone ID: AI054972.1.pep
PICIFFLGFIALFEPPLDHREPAVDSTVDGGPKPHGIGFVTLLKGDSMVRLPRPKKTKEKEPPASSLGRFRRRERRLQRRKPGVLGRGRSTKGGFRFGATGQRGVEPQALDVPTRHMGRAALRETRISC

SEQ ID NO: 116948 - protein, 132 aa, Gossypium hirsutum
  unsure (1)..(132): unsure at all Xaa locations
  Clone ID: AI054971.1.pep
MGQGIPGGLNRQGLPGDKKPNGFDKKDKKFXPAAPPARVGRKQRKQKGSEVVARLPTVTSLSKCKLQLLKLEQIKDYLLMEEEXFVVNQERLKPRKRKPXDSTKVDDXRXSSXSVGNLEELIGENHANVPIG

SEQ ID NO: 116949 - protein, 180 aa, Gossypium hirsutum
  unsure (1)..(180): unsure at all Xaa locations
  Clone ID: AI054970.1.pep
GAPPELASLLEEIGRESHTISGCGEIGADPELDEFMESYCEVLHRYKEELSKPFDEAATFLTNIESQLSXLCKGALTMDYRTDEGAESSXKLSGGELVEACESQEWHGGRRSQDIKGMADAQYSGYSSSLRKEILEKRXNGKLPXDARLTLLXWWNNHYRCHILRRERAEIIQMTGLDQS

SEQ ID NO: 116950 - protein, 146 aa, Gossypium hirsutum
  unsure (1)..(146): unsure at all Xaa locations
  Clone ID: AI054969.1.pep
MFNRLLGKPKQEPNALTSLDKLHETLXMLEKKEKVLLKKASAEVEKAKEFTKAKNKRAAIQCLKRKRLYEQQIEQLGNFQLRXHDQMIMXXGAKATXETVDAXRSGASAMKXMQKARIEDVDKHGGDHEQPKLNRSGACHSMELCD

SEQ ID NO: 116951 - protein, 40 aa, Gossypium hirsutum
  Clone ID: AI054967.1.pep
QKYRRYLVIFYFPQFSTRIGSKIIISSNSVILIEKLIHFM

SEQ ID NO: 116952 - protein, 222 aa, Gossypium hirsutum
  unsure (1)..(222): unsure at all Xaa locations
  Clone ID: AI054966.1.pep
KILTSKESKTENTQYYIQSWPDKKLCQITNFRHPYPQLASLQKEMIRYERKDGVRLTATLYLPPGYDPLKDGPLPCLVWSYPGEFKSKDAAGQVXRGSPNEFAGIGPTSALLWLARRFAILSGPTIPIIGEGDEEAXDGYVEQLVASAEXSCXXSIRRGVAHSNXIAVGGHSYGAFMTANLLAHXSXTFWCGNARSVAYNRTPTTFGFTMKDXTLWEQLILW

SEQ ID NO: 116953 - protein, 162 aa, Gossypium hirsutum
  unsure (1)..(162): unsure at all Xaa locations
  Clone ID: AI054961.1.pep
KLPSTKHYEHRERHCPSEPPTCLVPLPEGYKRSIKWPKSRDKIWYYNVPHTKLAEVKGHQNWVKVTGEYLTFXGGGTQFKNGALHYIDFLQQSVPDIAWGKRXRVNXDVVXXVASFGGYLFEEDVLAMXSFAPKDEHEAQVQXALDXGILHINVMGPKATFS

SEQ ID NO: 116954 - protein, 110 aa, Gossypium hirsutum
  Clone ID: AI054955.1.pep
FFSSVHFFFVSQRPVLGGEERKSWCLLLLRTMMNGGNLVDNDSAVAGGVEDMYGEDIATMGQPVTPWTVSVASGYTLLLDPRYIKGLAFTYRDRDAHYLLCLLPAYCFLF

SEQ ID NO: 116955 - protein, 77 aa, Gossypium hirsutum
  unsure (1)..(77): unsure at all Xaa locations
  Clone ID: AI054954.1.pep
EENQMEKRETINNCGNLKGRMNRGCIEANTLAIIDSAEIHKDSQDAKDDPFVHFXXGDFLEAXAYRFYCSRKRNTXN

SEQ ID NO: 116956 - protein, 81 aa, Gossypium hirsutum
  unsure (1)..(81): unsure at all Xaa locations
  Clone ID: AI054951.1.pep
MPFLVASPFKIGLFDKWKHCLYQAYKGMGIAQMKEYGKEVDVSGKNWRLRCLRFWKHCNEXLSHHISPFTXIIRLPVLSFL

SEQ ID NO: 116957 - protein, 172 aa, Gossypium hirsutum
  Clone ID: AI054949.1.pep
SLESKSEKVHKGSWISLDKSACCTDSVEFNYGITFNMGFPSFKMQSFSSLPRKAPGVVTSHLQSPSTASTYKQGMLSISFLRTAAPWPTYSRILYLRVAGFSKLGFSLRSSTYQLPIPKSSRPPSSRTPRDRSSPARETIQGKTGGGAMCIDHSLRSYWHTLPKKKEQTPLK

SEQ ID NO: 116958 - protein, 142 aa, Gossypium hirsutum
  Clone ID: AI054948.1.pep
FFFTCNLVFPLTLCSQNQAFPLFILLGEGEMEESNNYDHQHPLLLILNQEQLIDYQSGVTDCSRCGENGVYSMFLLCGALWGFTFTRYVPRHLWSLIILFILIILFFLCKMHLIQMESTLEILVIMRYRSLVISVLADGTFI

SEQ ID NO: 116959 - protein, 148 aa, Gossypium hirsutum
  unsure (1)..(148): unsure at all Xaa locations
  Clone ID: AI054947.1.pep
GEPNEGASCXGXLLSASRPHXGLDIAVEVSKRLIESDQXRDGXDVTLSTAXSLAGEWENANDLAEKMXXXRSCKEPXRSWIDYKDSNLRFYAGNISFKRGTEGMRMLKELEREMKEKGRSKGLVFVDVEEEAMEETVDHWLKRLNREP

SEQ ID NO: 116960 - protein, 194 aa, Gossypium hirsutum
  unsure (1)..(194): unsure at all Xaa locations
  Clone ID: AI054942.1.pep
FCGVFDGHGKXNGHLVSNMVRNRLPSLLLNQKNALEKIRTAADDKSFQHQVAKTDVKSIPNKDFLNWQEACIGAFKVLDKEIMLQENLDCSTSGTXVVVVVRQSEDLVIANVGDSRTVLGTITENGIKAVQLTXTDLKPGLPNEADRIRNCIGRVLALKGEPHILPXWLPHDEFSSLAMFLAFCNFLLMNHGIM

SEQ ID NO: 116961 - protein, 171 aa, Gossypium hirsutum
  unsure (1)..(171): unsure at all Xaa locations
  Clone ID: AI054941.1.pep
ECRVRDQSNAETRNISIPDERQSGDDGPNKVSEDLIRCLSSIFLRMNSIKKTFPSLSMLGSQETGFRDPYGICSDYGERDIGPYKHLVSISDDSINLNRASNSXXLLHRLKLLLARLASLDLQNLNHQEKLAFWINIYNSCMMNAFLDKEYXKVRLVVELMRKAHKVGGHC

SEQ ID NO: 116962 - protein, 89 aa, Gossypium hirsutum
  unsure (1)..(89): unsure at all Xaa locations
  Clone ID: AI054939.1.pep
MSGLEELRKKLAPLFDSEKGFSAGSTLDPYDSYMLSDSGTVNLLSRSYGVYNINELGLQKCTSSPVDXTDQGERRFXCASMRADIRAWW

SEQ ID NO: 116963 - protein, 60 aa, Gossypium hirsutum
  unsure (1)..(60): unsure at all Xaa locations
  Clone ID: AI054927.1.pep
NHVPLNPDTLLEVNGVRTGIYSDGPSTLLRRDRLDKKSEEATFVSTDSIKLTGSWXVEGF

SEQ ID NO: 116964 - protein, 89 aa, Gossypium hirsutum
  unsure (1)..(89): unsure at all Xaa locations
  Clone ID: AI054923.1.pep
MLINILFLMFEDFMSPVXSEILLLGLMINSTLXRRTHLFQSFSGGFLTGSTFXMNSLSLSPGWYPIAXLXFFSFXSPXLYRIHTEXXCI

SEQ ID NO: 116965 - protein, 126 aa, Gossypium hirsutum
  Clone ID: AI054913.1.pep
CHPDTVEAILEKEGDGGFATWASAMAFACTHSSEVGLSAKSEIKLMVMTLLKMTERLLGVGNPSGGLLRDCFTSLIKTSIQLKELDEEMEEEENDEESEDDDNDDEDEDDDEIEIDDEELSEHEEN

SEQ ID NO: 116966 - protein, 92 aa, Gossypium hirsutum
  unsure (1)..(92): unsure at all Xaa locations
  Clone ID: AI054907.1.pep
KITTFTRIVRYPSTSLPASLQGFWFFLESLVFSSTYPDLEILNRIFFSSFHYFNLRLCESDFAGLSLDEEEKKILHLLGRAFGLREGLLRXR

SEQ ID NO: 116967 - protein, 89 aa, Gossypium hirsutum
  unsure (1)..(89): unsure at all Xaa locations
  Clone ID: AI054899.1.pep
CPQYQISEQLLVQYFYEGLTPQDRGMIDAASGGALVDKTPEQAQNLIANMAQNRQHXGFRRSDLGKRMDEGQSSMMEAQLANLRFGKVS

SEQ ID NO: 116968 - protein, 91 aa, Gossypium hirsutum
  unsure (1)..(91): unsure at all Xaa locations
  Clone ID: AI054894.1.pep
FQWLAKSMNRQIQTNSLSDYDSHLAXWHRYRNNVLPLYVNIINQXQLRTVSSSPNEFPAXLLHSXYYRRRIPRCXESTXPNLVTXILNGHG

SEQ ID NO: 116969 - protein, 197 aa, Gossypium hirsutum
  unsure (1)..(197): unsure at all Xaa locations
  Clone ID: AI054892.1.pep
MFLQILLFVALYSITVHLYHKFQNHPPTPFPSLPFIGHFYLLLKKPLHRSLAKISAKHGRVLLLHFGSRPVAVISSASAAEECFTKNDIIFANRPLLLYGKHLXYNYTSLIWDSYGDNWRNXGVYXSIQLLSXHLLXXLYATRLIXIRLLFRKLSRDHDXTVDLKSRLFELMLNXMMXMIAGKDICAVVESTRFVKY

SEQ ID NO: 116970 - protein, 153 aa, Gossypium hirsutum
  unsure (1)..(153): unsure at all Xaa locations
  Clone ID: AI054889.1.pep
MKAPPPYNLCNPNKKSAIINRSYALLHSIAITSLIFYRLSSFFHSTPSLPLLLAFTSELILSVLWLLSQAFLWRPFTRXTFPERLLQDKNDDELPASNVFICTADPETEXALEGETPXFVGMAMDYPAENYRFXVSEGXXXGLTLYAMKEVGK

SEQ ID NO: 116971 - protein, 147 aa, Gossypium hirsutum
  unsure (1)..(147): unsure at all Xaa locations
  Clone ID: AI054885.1.pep
MRHPHSSLPPGFRFHPTDEELILHYLMKKLSSSPFPVSIIADVDIYKFDPWDLPDKAVFGEKEWYFFSPRDRKYPNGARPNRAAGSGYWKATGTDXIIVASSMAAGRVGVYXHIGVKKXLVFYKGRPLKDKTFGYAEYALHTLPHLI

SEQ ID NO: 116972 - protein, 173 aa, Gossypium hirsutum
  unsure (1)..(173): unsure at all Xaa locations
  Clone ID: AI054884.1.pep
NKVESIKXDKTATEKLLQETIEKHQAELAAQKDFYTNALNAAKEAEALAEARANNEARTELESRLREAEEREAMLVQTLEELRQTLSRKEQQAVFIEDMLSRARKDLKKRYXSDXXVRXXDSQVPESTRPLLRQIEAMQETTXRRAEAWLRXXGSLNSRLRKQSKAAVLRRRL

SEQ ID NO: 116973 - protein, 90 aa, Gossypium hirsutum
  unsure (1)..(90): unsure at all Xaa locations
  Clone ID: AI054882.1.pep
TWXSMEVELYPELIIDXREHXXMWIQGITAYITXMYQRHXRDLWMXNVANLDLXXVLNRTXVLRPTISSYAGAXITDGIITYFTEAXTKC

SEQ ID NO: 116974 - protein, 87 aa, Gossypium hirsutum
  unsure (1)..(87): unsure at all Xaa locations
  Clone ID: AI054881.1.pep
LCKFVNFFPNFNIFMLDRXKXCVSKIXHSFRISNISLKKKALLFNCCRDVATLIHLLCCCILGDIPLVQPNLDPSRTIILGPPNLKS

SEQ ID NO: 116975 - protein, 94 aa, Gossypium hirsutum
  unsure (1)..(94): unsure at all Xaa locations
  Clone ID: AI054879.1.pep
TNLLVQVQSQYAGPFFLSVYYLFQVLSPDMSLATVRAYIWKNPRIWDLILELFRHGELVILRVSCDYSGKFSDPYYSLQNTSXDVYSSGTLXVI

SEQ ID NO: 116976 - protein, 57 aa, Gossypium hirsutum
  unsure (1)..(57): unsure at all Xaa locations
  Clone ID: AI054870.1.pep
KDDEFGYTSMCVFVRARAFLMLFFSISRMPCICFQRKKMGIHMNLNXFFSFSIRLHS

SEQ ID NO: 116977 - protein, 102 aa, Gossypium hirsutum
  Clone ID: AI054868.1.pep
QAFQNEICRMRLDDAMLDELVREYCVYRGIVEPGMQTSSEPLKVNPPESGCCSSLDSSIDVDHSTAKHSNSETSALTDLSSMQGIDVELRFASEPTNNLEDL

SEQ ID NO: 116978 - protein, 132 aa, Gossypium hirsutum
  Clone ID: AI054867.1.pep
FSGDSNGYVIGSEDEVGSMSGTGDSVTMVLIPGLPDESNGECGAPISSCFWECKPKFNVHYEISGSQNVNSPPLLFLPGFGVGSFHYEKQLMDLGRDYRVWAIDFLGQSLSLPTENPTSSFMDEGSCVMIWG

SEQ ID NO: 116979 - protein, 115 aa, Gossypium hirsutum
  unsure (1)..(115): unsure at all Xaa locations
  Clone ID: AI054863.1.pep
VLDNVDAIFGLHVLHSAPIGTVASKPGPLLAGSGLFDAVISGKGGHAAIPQHSIDPILAAXNVVVSLQHLVSREADPLDSKVVTXXXSFKGGGAFNVIPISVTIGGTFRAFSXRV

SEQ ID NO: 116980 - protein, 204 aa, Gossypium hirsutum
  unsure (1)..(204): unsure at all Xaa locations
  Clone ID: AI054856.1.pep
EIESICSRPSWKGILCHLWPRAKYIEAVVTGSMAQYIPPLEYYSAGKLPLVCTMYASSECYFGVNLKPICDPAEVAFTLLPNMGYFEFLPLGENGALAMDMDEEEAVPNDRLVDLVNVKVGCYYELVVTTFSGLYRYRIGDVLQVTGFHNQAPQFRFICRRXNVVLIVDNDLTNEEXDLHRSIITTKTLLETYTPCCRVTTLPI

SEQ ID NO: 116981 - protein, 78 aa, Gossypium hirsutum
  Clone ID: AI054854.1.pep
REGNDLYREMIESGVIKLGEKQADSKCALVYGQMNEPPGARARVGLTGLTVAEHFRDAEGQDVLLFIDNIFRFTQANF

SEQ ID NO: 116982 - protein, 203 aa, Gossypium hirsutum
  unsure (1)..(203): unsure at all Xaa locations
  Clone ID: AI054848.1.pep
WKWGFSISTIAVSLSIAIFLAGSAVYRNKIPFGSPLTTIGKVLVAAMLNSCMSKNPKNAIANLTTSPSYRTETSKEGDHQIPTESLKVLNRAAVNKPAYPALECSVQQVKEVKXIVLKIFPIFACXIVLNCCLAQLSTXSVEQAATMNTKLGSLKIPXASLPVFXVGLIMNLAPLYDHFIXPFARRVTKTEMGITHLQRXGIG

SEQ ID NO: 116983 - protein, 135 aa, Gossypium hirsutum
  unsure (1)..(135): unsure at all Xaa locations
  Clone ID: AI054845.1.pep
NSCVLHKYFRGSAYGVGQRTAPVLDLKKEAKSPISLANLFEVVADDLQTLNQNLXSIVGAENPVLMSAAEQIFGAGGKRMRPALVFLVSRATLELVGLKDLTTKHRRLAEIIEMIHTASLIHDDVLDESDLRRRR

SEQ ID NO: 116984 - protein, 140 aa, Gossypium hirsutum
  unsure (1)..(140): unsure at all Xaa locations
  Clone ID: AI054844.1.pep
SAKQRLAGEESENDYYRDSSSDGSSDYEIGKGIKFSREQCSQFSLTNEIPFRVRSLSISDENSMLXEGFSSDDCETRNSRDHLLFEFFEHKTPYSREALSDXIFDLSCKYPGLXSLRSATYYPSVDVGAWYPYPNPSGLH

SEQ ID NO: 116985 - protein, 106 aa, Gossypium hirsutum
  unsure (1)..(106): unsure at all Xaa locations
  Clone ID: AI054843.1.pep
FIVYFYHFYVYFIFIYFYLILYXIDYFFCFIYVYIFYXLLFVCNFIFMNIFNYFXIVLYFYLLILSLFLVGYMYLIIFLLYYYIYMIYFILIYFIVYHYSLYYIFY

SEQ ID NO: 116986 - protein, 74 aa, Gossypium hirsutum
  Clone ID: AI054841.1.pep
IQFHSLRIKFQQTILSLSFYKQFLQCISSELSFSTFNSISFMHTFHAVNLNFHFNTCYTYIQHTLYILTIHVIS

SEQ ID NO: 116987 - protein, 109 aa, Gossypium hirsutum
  Clone ID: AI054839.1.pep
LLMDVNVQFYLLIICYWLSYVLEPFPVLLVLSCAVYLYMPFGYLLSCLFLISVCLSLCFFSLFYLLFHLFFSFCIFFICLFVFLIFFLSFSLIVISSCVLFIFSIFYTV

SEQ ID NO: 116988 - protein, 158 aa, Gossypium hirsutum
  unsure (1)..(158): unsure at all Xaa locations
  Clone ID: AI054829.1.pep
MEESFVPFRGIKNDLEGRLKCYKQDWTSGLRAGFRILAPTTYIFFASAIPVISFGEQLERETDGILTAVQTLASTALCGIIHSXIGGQPLLILGVAEPTVIMYTXMFNFAMNMLDFGIRAFFCWTXWVSVWTVCCSSTCYLRSCSFYTNYSSCGELYS

SEQ ID NO: 116989 - protein, 156 aa, Gossypium hirsutum
  unsure (1)..(156): unsure at all Xaa locations
  Clone ID: AI054828.1.pep
FDTQPSNPSPVFKRRKTEGDPVSVHRIQSNQTMKRWTTKREHQIYSSKLFQALCRSRRTSSSTSAKELHQTADRVLAITAKGTTRWSRAILAAPLTAGTNMKKHKKANXGPYNVEEARWLTHXKRKLPVVERKLRTFIRFGPCCWIQSCNILFNSK

SEQ ID NO: 116990 - protein, 157 aa, Gossypium hirsutum
  unsure (1)..(157): unsure at all Xaa locations
  Clone ID: AI054823.1.pep
TMLKDVILEQLLIAVSTSKEEMVIRASVTVLTTIVSTNISVVDDIXKKGLRLTDLSRALKYNVHEAATLIYLIKPSAAEIKTLELLPTLVEVICTSNSSRCMPSKSCSVSPPAASSMIIEVLVTAFDNATNNMHLAAINSSRVLIGLFVVAYNHCLE

SEQ ID NO: 116991 - protein, 177 aa, Gossypium hirsutum
  unsure (1)..(177): unsure at all Xaa locations
  Clone ID: AI054822.1.pep
MEIDKAIRESDDKRLKTKYNNAIYVIKRALALYSIEEVAFSFNGGKDSTVLLHLLRAGYFLHRLEQSCSNGVQIDFPIRTIYFESTYVFPEIYTFTYDTXRTYGLQMDIIRTDFKYGYXALLKSKSFIAIFLAFNWCSTVVAIAVLLYSYDGPFFEVYLLDCIQEFGFFKMYVFLYL

SEQ ID NO: 116992 - protein, 106 aa, Gossypium hirsutum
  unsure (1)..(106): unsure at all Xaa locations
  Clone ID: AI054818.1.pep
MELQHDENGLEDSNDVLLGEDEQMIEIESESSDEELEPETSVLGSAAIMVGDVTNVLVGLIGSRLRYKDLQRAFGPSERSYLETQLHSYQRGWGXKLSERKVYSLG

SEQ ID NO: 116993 - protein, 104 aa, Gossypium hirsutum
  Clone ID: AI054809.1.pep
TKRRSLLFCFETLAAVSFHRHQNVVKGCLQLSTLLSRPSISPFSKPSIRFDFGFKALSVKFFFSSSFFSGHQVLDDITQRTKLEADHFTLLIGSPTFFAKKVSL

SEQ ID NO: 116994 - protein, 68 aa, Gossypium hirsutum
  Clone ID: AI054803.1.pep
SLLINFDTFSDSIENMLERDFSSISLLLNAVNDLMFIALCLDPVSVVNLIHIMILFFYRCTKLADLDS

SEQ ID NO: 116995 - protein, 107 aa, Gossypium hirsutum
  unsure (1)..(107): unsure at all Xaa locations
  Clone ID: AI054793.1.pep
GIEKPAWLEGIYTQKFFVGCSYHETAKKNEKNVYCWICCXLSICPHCISSHSFHRLLQVRRYVYMXVVKXXDLQKLIDCSMFFVNRQSSWFFFYFFFVKIQFIIHGL

SEQ ID NO: 116996 - protein, 61 aa, Gossypium hirsutum
  Clone ID: AI054791.1.pep
HVLMAIKYFYRLSPFARFYLKPSSTSYLTLFKTSYSIIKHQNIQILPMGIFSNINPRLNYC

SEQ ID NO: 116997 - protein, 144 aa, Gossypium hirsutum
  unsure (1)..(144): unsure at all Xaa locations
  Clone ID: AI054790.1.pep
CISISFSLKGGIALSRTFLGISILIGLVTYKLRRRHLCADDKIEEFLRNQNNLIPIRYSYNEIKRMTRGFSDKLGAGGXGSVFKGKLRSDHDVAVKLLDKSKANGQDFIAESATIGKDHHVNVANLEXLCVWIKTALDMYANGS

SEQ ID NO: 116998 - protein, 185 aa, Gossypium hirsutum
  unsure (1)..(185): unsure at all Xaa locations
  Clone ID: AI054768.1.pep
GGHVEHALTNANSTHGTGFQLSHSLPEPKLSQYHGTIPTFGPSNGXGMEQCLGPQFLWGNPNSYADRTNSSVWPTSSMEHPFSSNGNGHGFPYTGRQGSFSGSSHHHHHMGSAPSGVPLERHFGFFPESSENSFISPATFGGMSVGHNEGFMVNMGSRAXPKVXIGIPRNVSGNGSSMRMMSSPR

SEQ ID NO: 116999 - protein, 108 aa, Gossypium hirsutum
  unsure (1)..(108): unsure at all Xaa locations
  Clone ID: AI054765.1.pep
KVPLIFIYMFLYSFFFDIYFLIYLFVXIYLLVLFILIFHLFVYIIIYYYLCIHSLFYIYFTYHYYFSIIYLYYFNLNLLYLSINIIFLYYFIYYILYIIYIYTLSYHK

SEQ ID NO: 117000 - protein, 96 aa, Gossypium hirsutum
  Clone ID: AI054761.1.pep
MLFLKLFLLFSLFSFTFSHDAAFDPHLLPRPLIIQPEDIETLFEKFDDELNLHCTSWRFSVEANNLSPWKTIPEECLCYVTEYMTGRGYILYLERF

SEQ ID NO: 117001 - protein, 122 aa, Gossypium hirsutum
  Clone ID: AI054760.1.pep
LLFSLLSYCMLSCFFLLLPLNGHGFYHTSIINILWRPFFFHGFISLSYVSLNIVPSTSLFTLRSVIHHFLSFFFISYVVCFLIFVFISIYILILILTLYRVQSPAFILTSFLSSPFLLFHMH

SEQ ID NO: 117002 - protein, 139 aa, Gossypium hirsutum
  unsure (1)..(139): unsure at all Xaa locations
  Clone ID: AI054755.1.pep
CVHEGGTLCFPAGSNGNHVSAAKFLKANIVSIPTNSEEGFKLTEKTLQQYHWKTVXNPWVYISGPTINPTGLIYSNKEMENILTACAKFGARVVIDTSFSGLEFDFDGWGGWNFYFFSISSIFYFLIINLSIIYYFYNL

SEQ ID NO: 117003 - protein, 43 aa, Gossypium hirsutum
  unsure (1)..(43): unsure at all Xaa locations
  Clone ID: AI054747.1.pep
KIGVYYGXNPEVTSGGIALKFFSSVRLEIRPTGKIKSVSTLSQ

SEQ ID NO: 117004 - protein, 59 aa, Gossypium hirsutum
  Clone ID: AI054745.1.pep
SLSALIHSRIVASMVSLLLFMQLSTFFASSIQCKSSICGTVYIVYSTSNGHELFYLNVI

SEQ ID NO: 117005 - protein, 90 aa, Gossypium hirsutum
  Clone ID: AI054743.1.pep
SRVYIVLGMQRHIFAKSKFLLETCMCIYIEVPEIRLYLAALIDPWDKDYVLKWVSHRLNLSLLLQISIEFCFSVDTKFLFIPINFIGLDK

SEQ ID NO: 117006 - protein, 83 aa, Gossypium hirsutum
  Clone ID: AI054741.1.pep
ESENHITAAEGVLSVSPSLSLHLSFHLDSNYSSSPILISPFWYLITTYHTTSAGGFLSLSLSPPPLIQSPFSYSVDWALENYC

SEQ ID NO: 117007 - protein, 142 aa, Gossypium hirsutum
  unsure (1)..(142): unsure at all Xaa locations
  Clone ID: AI054738.1.pep
DKGYNSFPTNIPGTPYRKALQARKRLSKILSDIIXERXGIRKLSGKRYLLGCLLNSKXEKGQVLTDDKIADNIIGTLLRCSGTRRSSVHVHGIVKYLHXNPKLLESVNAEQKSIKILTEEINHPLSWSHTRNIPITYKWKAF

SEQ ID NO: 117008 - protein, 41 aa, Gossypium hirsutum
  Clone ID: AI054737.1.pep
YILRQFCLLVIMLTQICYQLVYFKKRRRKFYNFLYTLCLSF

SEQ ID NO: 117009 - protein, 179 aa, Gossypium hirsutum
  unsure (1)..(179): unsure at all Xaa locations
  Clone ID: AI054735.1.pep
IPFLRVKEFVRAHGGNFAAKFAHLTEMEVKHRCSQILELGFXYGGTLPRIFAQDWEGDITVVMPATVSQYLKILQNPTLVELQKAANQXGRRCTWEKXLSAMKANCGIELASMKCVAILNHMRRLNRSADRAAAALSHGLANTTNFSVSKTFYRCYFVFAYDQFFGIPHLLDLQPFEAY

SEQ ID NO: 117010 - protein, 140 aa, Gossypium hirsutum
  unsure (1)..(140): unsure at all Xaa locations
  Clone ID: AI054729.1.pep
MFLSSPSFTLLDLQIPLIIVDRGFSYFIFCGFILPTMWRFKPFLQKEPAGLEGRTLDVANLKLHVRNVIAXGGFSCVYLAKDALHAXKQYALKHIICNDQEXLELGCQEINVLKSLQDTGRHHTYAIRSWNGKTKKLCME

SEQ ID NO: 117011 - protein, 42 aa, Gossypium hirsutum
  Clone ID: AI054727.1.pep
MLWLIFLINSVCAYGQKEKKSVLANTNFFMNIEGTYPSARNL

SEQ ID NO: 117012 - protein, 81 aa, Gossypium hirsutum
  unsure (1)..(81): unsure at all Xaa locations
  Clone ID: AI054721.1.pep
KCKTXLKINLIRYTIDFNKKLKLFFSDKSFLTYVPGLGTRVRTQVSNKSDFPTFPVNCAWHLLIYIILSPKKTDYVCKLKI

SEQ ID NO: 117013 - protein, 63 aa, Gossypium hirsutum
  Clone ID: AI054719.1.pep
RQLKKYQWKLKFYFFYISYLGWKIKFTKFEFVVNDVRYTSYKLKTRIKYWFQFDPIVLIPFYD

SEQ ID NO: 117014 - protein, 107 aa, Gossypium hirsutum
  unsure (1)..(107): unsure at all Xaa locations
  Clone ID: AI054717.1.pep
GDPNGISLVRRETDSVCADIYEWQPTLMNYEMQASGKVNKPLRPKVHLKCXMQGQKISAVKFASFGTPEGVCGSXERNCHAHHLYDAFNKLCLXQNFCTETVAPVMF

SEQ ID NO: 117015 - protein, 124 aa, Gossypium hirsutum
  Clone ID: AI054711.1.pep
VLSGRDVICKVKASGFRVATSQISATFSQDGKQIISASEDSNIYIWNYANQEKNSSKLKSISSCESFLSHNASVAIPWRGIETIPATLTSLDWWVKRNSHPSGQNIKVKGGAGTPMPILPDCFS

SEQ ID NO: 117016 - protein, 148 aa, Gossypium hirsutum
  unsure (1)..(148): unsure at all Xaa locations
  Clone ID: AI054710.1.pep
LEENDVKKLNLLNTLPLVSPYSDGWKLDSWSLEAEKYRVGIIHEFLSLTLXEKRALIHHIVEFKEEFSLTRQTYEMLKRQPWTFYLAGTEMNXXXFLKMGMMRNGXLIEKDPXXVFNEKLINLVKCKKKKRRRKNSGFMEKFQGIDIF

SEQ ID NO: 117017 - protein, 62 aa, Gossypium hirsutum
  unsure (1)..(62): unsure at all Xaa locations
  Clone ID: AI054705.1.pep
FFIALLSGTLYISFTLTQTFVTSRKCSSSGVYLTXTPXTSRPXLLLRXXTCEYILXKLSNET

SEQ ID NO: 117018 - protein, 142 aa, Gossypium hirsutum
  unsure (1)..(142): unsure at all Xaa locations
  Clone ID: AI054702.1.pep
RIIPASIYQGSTVSLALQLSCSVLVVACPCALGLATPTAMLVGTSLGATRGLLLRGGNILEKFSMVNVIIFDKTGTLTIGRPVVTKVVTPSGMDHSDSRQHFMVSWSEXDVLKLAAAVESNTIHPVGKAIRGSCPSCEKVQT

SEQ ID NO: 117019 - protein, 74 aa, Gossypium hirsutum
  Clone ID: AI054699.1.pep
LQWVITIELSRCLGDRLKTRLLAKGHVLLMVAPLDTFSRVIKLTSVCLLISLVASHNWPLHRLDIKSLKRKVYI

SEQ ID NO: 117020 - protein, 95 aa, Gossypium hirsutum
  unsure (1)..(95): unsure at all Xaa locations
  Clone ID: AI054698.1.pep
GIVDSAQMXYADYEYCSRKVCXYNQKRSGYEICFIIRLRVLLQLVDCKXXQEVQGVQQDHHFILRSSRNPXISTXXVLPSSDSGSXXSIXKVEXV

SEQ ID NO: 117021 - protein, 102 aa, Gossypium hirsutum
  unsure (1)..(102): unsure at all Xaa locations
  Clone ID: AI054696.1.pep
TPGHESVDAASXTXPIYQLGISXWSQTGDSXVLKTMIXRDVTSXVVAEAYAGLQAVQLGIXVKLPLVTVMGDSRTVXQKMQRWPDLTQHHSQPEERWKNNPD

SEQ ID NO: 117022 - protein, 64 aa, Gossypium hirsutum
  Clone ID: AI054695.1.pep
VLTTLCIHYFGSRCCIGVSPGNSQCPYGFVRHWPGYSLSFQPKSRPIFLRRFDLCKSHGQRRLP

SEQ ID NO: 117023 - protein, 154 aa, Gossypium hirsutum
  unsure (1)..(154): unsure at all Xaa locations
  Clone ID: AI054694.1.pep
YLDPKTAQVAIVDHVKQACTKVRPATDEELPSAYVEEYRCALEAEILKYVAEAYPKGSCSVYCTNGKGXEEPGSDFDLVXVIAAARLSPQNFCNGSWRTIWTLEFKDDIQRLELNGKCWXGAHYFEEGKCAIRYKHECRDSQVFSLPMICNFCS

SEQ ID NO: 117024 - protein, 92 aa, Gossypium hirsutum
  Clone ID: AI054690.1.pep
TSEWEAKAAAYRVFKNVAKPGSKYIEEDDLLRFMKREEVDNVLPLFEGALETGKIKRSTFKNWVVNVYLERKSLAHSLNDTKTAIEELNKLV

SEQ ID NO: 117025 - protein, 112 aa, Gossypium hirsutum
  unsure (1)..(112): unsure at all Xaa locations
  Clone ID: AI054685.1.pep
SLSEEFSPSRGVHQGDPLSPYLFVLGMERLGHFIENXAEKRVWEPIKLSXEGPNISHLFFSGNLLRFGRATSQGTDYLRKVLESFCWFFGHKVNRQKIQVFFFSSNVSDGGC

SEQ ID NO: 117026 - protein, 160 aa, Gossypium hirsutum
  unsure (1)..(160): unsure at all Xaa locations
  Clone ID: AI054684.1.pep
ELLVSLRKAQLKYKLSDELAKDLLMEHKRKLVEENISVALNILKSRARTVGGVKQAVEELDKILSFNDLLISLSKHPDADHFAPGLGPVSLVGGEYDSDRKMDDLKLLYRAYVSDSLSGGRMEKDKLTALNQLRNILGLXNKEAEAIILDVTSKVYQKRL

SEQ ID NO: 117027 - protein, 98 aa, Gossypium hirsutum
  unsure (1)..(98): unsure at all Xaa locations
  Clone ID: AI054683.1.pep
SFNSESSSQSPDTGRQEHLKTPDIQRESLIQSPVRDRLQIFLQSSDLYDPQEVLAWILDLXLWLENAILYRKLGQESLVLQILAQILDDCEASEQLLC

SEQ ID NO: 117028 - protein, 56 aa, Gossypium hirsutum
  Clone ID: AI054680.1.pep
RSKMKGILFRSTLHGQFKTICFLNSINDKNITLTKIYKCNTKEFYKIFEHLINPNF

SEQ ID NO: 117029 - protein, 100 aa, Gossypium hirsutum
  unsure (1)..(100): unsure at all Xaa locations
  Clone ID: AI054679.1.pep
RSHKEKRSSYAPEKGVRYDGVYRIEKCWRKVGIQGFKVCRYLFVICDNDLCPHXLLIVHGDRPKPLPAIPYLIKASRCFLYNGFVHLGTLLIDYILLNLL

SEQ ID NO: 117030 - protein, 89 aa, Gossypium hirsutum
  unsure (1)..(89): unsure at all Xaa locations
  Clone ID: AI054671.1.pep
DTEFLKWRWKPHQCQLPRFDPKTFLEFVQGKKLGFIGDSVARNHMDSLLCLLSMVNRTPXDHYXDSEDRNGYGSFPGHDFTLXDSWTKX

SEQ ID NO: 117031 - protein, 112 aa, Gossypium hirsutum
  unsure (1)..(112): unsure at all Xaa locations
  Clone ID: AI054666.1.pep
XYYSNLATFXVXMHILTIYVXSGHXTRHLTKWARWPMKPDFGHKPKLSXCTKSRVLQFITLRLPXYTTQLSYEHSHTRXIPKILTFRHFGFSAFANLVYERVSVTHLFATIC

SEQ ID NO: 117032 - protein, 80 aa, Gossypium hirsutum
  Clone ID: AI054663.1.pep
LEKPLVSHILINSRRRMLNMNLYLQSIFTVGDMGMWKTLVLLRILKSLVKRRMPRRKCHRRFKTRSRLAWRRNTGISDHG

SEQ ID NO: 117033 - protein, 204 aa, Gossypium hirsutum
  unsure (1)..(204): unsure at all Xaa locations
  Clone ID: AI054662.1.pep
SNEISNNNSTTCCIVPAAATTTSETLVSSEPLNTPDVAALQLLSKNLESLYESTDSDYFYSDAKIALSSGREVAVHRCILSARSSVFKXVFSGLKDSGAKFELKELARDYEIGYDSLVAVLAYLYTGKVKSLPXGVCLCVEMGCXHVGCRXAVDFMXGSLYAAFVFXVPELMLFIENLLTSRLVGVNDICVLTLQNVRHVVKNG

SEQ ID NO: 117034 - protein, 168 aa, Gossypium hirsutum
  unsure (1)..(168): unsure at all Xaa locations
  Clone ID: AI054656.1.pep
LHLADGTILKTKVLIGCDGVNSAVAKWLGLQNPVFSGRSAIRGNAHFKGGHGFEPKYRQFVGKGVRSGFLPCDDENVYWFFTWTPATKEEEMEDKPLKLKQLVTSKLKDTSDEMKSVIEKTLLDDIIFIAIKXRKPWELXWGNFSKXTFCXPGDALHPMTPDIGQXXC

SEQ ID NO: 117035 - protein, 81 aa, Gossypium hirsutum
  Clone ID: AI054655.1.pep
SFMSKWFIPRLGFCVCVQHVHIQSFLQVFHVFGGYLKSHIPILIFGNIGHENLKRNEESEEDLFHNNSTFCGFLFFLSIYL

SEQ ID NO: 117036 - protein, 58 aa, Gossypium hirsutum
  Clone ID: AI054654.1.pep
SDYTVKLTTTASNSQHGTKNWYTDISQLQIFECSFQNRQINFSEIDISAFSMHLVKTK

SEQ ID NO: 117037 - protein, 132 aa, Gossypium hirsutum
  unsure (1)..(132): unsure at all Xaa locations
  Clone ID: AI054643.1.pep
DCFILKLCTDPQTLKARSEGPAEIIRHVLFGYFSQKTGLLVQMEDSHLTRIQSNGGDAVYWETTINSFLEDYRSVEGIMIAHSGRSVVTLFRFGXEVAMSHTKTKMEEAWTIEEVAFNVXGLSVDCFIPQVI

SEQ ID NO: 117038 - protein, 83 aa, Gossypium hirsutum
  unsure (1)..(83): unsure at all Xaa locations
  Clone ID: AI054640.1.pep
RKVLGCLNDGEXGVMILHLEFEPKRSHQWLWDXSETDLFSNQKQLLDVTTTNLFSGNLNSTCLHGEMHLGSFNLVQFANCIRN

SEQ ID NO: 117039 - protein, 65 aa, Gossypium hirsutum
  unsure (1)..(65): unsure at all Xaa locations
  Clone ID: AI054635.1.pep
SEICAQICFLIIVCVTGLDGXCQNGYDQLFSRFHCIXGSXRIMSYPSPDSINAGTSRNKELSTYL

SEQ ID NO: 117040 - protein, 238 aa, Gossypium hirsutum
  unsure (1)..(238): unsure at all Xaa locations
  Clone ID: AI054632.1.pep
KDQNYEATRLHFENLVERYGNPIIILNLIKTQEKKPRESILRQEFAHVIDFINKDMSEETCLRFLHWDLHKHFRSQATNVLLLLGKVAAYALTLTGFFYCRXTSTLRPDECTAWPSSENIDDGDMSPPKYCDNXTRGADRLEXNHSGDNNTANGNHSVKPPTFQRGVLMTNCIXCLDRTNVAQYAYGMAGLGYQLNTXGVKDPPMMXLDDPLADELLTFYERLGDTLAHQYSGCCISH

SEQ ID NO: 117041 - protein, 59 aa, Gossypium hirsutum
  Clone ID: AI054628.1.pep
INIILFIQFESKIGIFPVTFLIIKVHFFSFFLFYFREGFESFFISSPLPNNRNATFFLA

SEQ ID NO: 117042 - protein, 133 aa, Gossypium hirsutum
  unsure (1)..(133): unsure at all Xaa locations
  Clone ID: AI054618.1.pep
YLTLKDEELMRQCELNTFKASGPGGQHRNKRESAVRLKHLPTGIIAQAVEDRSQHMNRASALARLRTLIALKEIRSLLESYSPPPELLQILPXKLTIXRSXXGPQIGPNNPKFIXGVCRALLDLIXAXDWVYI

SEQ ID NO: 117043 - protein, 203 aa, Gossypium hirsutum
  unsure (1)..(203): unsure at all Xaa locations
  Clone ID: AI054610.1.pep
LVLFIGVNHHIQPTLLGCALIADETVYTFLWLMQTWFMAMGERAPQVMLTDQNNAIKAAVAAVFPTTRHCFCLWHVLEKLPRHLEYLSLWHDSLMLKLDKCIYRSWTEDQFEKRWWKMVDKFHLREMQWXLSLYEDRKRWVPVFMRDISFAGLSTALRSDSXSSSFDKYVHGETSMREFIEHYRVILEDRYEKETKADYYAWH

SEQ ID NO: 117044 - protein, 155 aa, Gossypium hirsutum
  unsure (1)..(155): unsure at all Xaa locations
  Clone ID: AI054609.1.pep
NGVRYLMLCRVILGKAELVQPGSKQCHPSSDEFDSGVDDLSSPKKYVVWSTHLNTHILPEFIVSFRATSSLKGFSWDARXLKMPTSPWISFPALISALSKYLPPTAMXLISKYYXDHKDKKISRHELIQLVRXICWDKLLIAVIKSSRTKQYRHK

SEQ ID NO: 117045 - protein, 60 aa, Gossypium hirsutum
  unsure (1)..(60): unsure at all Xaa locations
  Clone ID: AI054608.1.pep
ENLMAVVIGDREENVSGSKHEFTCFYTFHMXNMISYIXVLHEVIRFMNTKLISYRPVFAF

SEQ ID NO: 117046 - protein, 163 aa, Gossypium hirsutum
  Clone ID: AI054607.1.pep
FKTNQEVTVSTLGRLVMVVWLFLLMVITSSYTANLTSILTVQQLSSPITGVESLIGNSWPIGYQVGSFAHGYLSDNLNIQRSRLVKLHSPEEYETALRLGPDNGGVAAIVDELSYVELFLSKRTDFGIIGQPFTKSGWGFAFQKDSPLAVDMLTVIFELSETG

SEQ ID NO: 117047 - protein, 97 aa, Gossypium hirsutum
  unsure (1)..(97): unsure at all Xaa locations
  Clone ID: AI054603.1.pep
KGGIRFTINGHSYFNLVLISNVGGAGDVHAVAIKGSRTGWQPMSRNWGQNWQSNNYLNGQSLSFKVTTSDXGRTVVSNNVAPAGWSFGQTFTGGQFR

SEQ ID NO: 117048 - protein, 78 aa, Gossypium hirsutum
  Clone ID: AI054597.1.pep
IAKAFFATHLLYLHTLYLKIISNFITKWCLKDQAYGKDLTSFYFFLTMLLFKLDDPNRFFKWNVTYGDNFPLWCLSVR

SEQ ID NO: 117049 - protein, 76 aa, Gossypium hirsutum
  Clone ID: AI054590.1.pep
YCRSVLFNFETKIACLLFPKNFPSISYPQIKPNRFAFTFSHFLLAKSIRLHLLPAKGTLTAKGFTILPLLAATEKQ

SEQ ID NO: 117050 - protein, 169 aa, Gossypium hirsutum
  unsure (1)..(169): unsure at all Xaa locations
  Clone ID: AI054587.1.pep
VLLTREVISIIMIQXXXXLCQQELPVXINSCVGFTTCNXXFPCHEIXXLYILHLLEREDATXLHWFFPCTPTCLHHALLSNIYMXYVHRILDEVLEEIPSSHKELLHNYRQSFQLPFPFIFFTRVIPIAPSKYNGARVIVGTFNKSLETLLLESFFIEKDNGGVRLGVF

SEQ ID NO: 117051 - protein, 133 aa, Gossypium hirsutum
  unsure (1)..(133): unsure at all Xaa locations
  Clone ID: AI054585.1.pep
DEKKKDGLGSANDGFYESKREWLGRRHFVLAFESSASGMFKIVRPAVGESVREMTLAELKNKYRRISLLEKARAGGKMNLEVSSKQCMHGPNCKLGNFCTVGRRXPELMXXGGLIXXVWGTIEKALSNRPVSA

SEQ ID NO: 117052 - protein, 95 aa, Gossypium hirsutum
  Clone ID: AI054578.1.pep
LRLKFLWGVLGFSPVRSALSFTSKCSSGFFIWMYLSRIQRLMDIVLGHIFTSAGLLMLPLCIGPSFGSLFQAFPPLLSPFFDFIIHTRFYSSYVS

SEQ ID NO: 117053 - protein, 65 aa, Gossypium hirsutum
  Clone ID: AI054574.1.pep
GEYKGTNIGFCPHRCLIIKLLTLQAHTLHSPNSSAIIDTLIILLLDGNLKTSSSTNLFFYKNRKY

SEQ ID NO: 117054 - protein, 152 aa, Gossypium hirsutum
  unsure (1)..(152): unsure at all Xaa locations
  Clone ID: AI054568.1.pep
MYEHLLTGIERCIIEEDNSRLTAQYTMDEIKEALTSMGTTKALGEDGFQTLFFQKYWHIFWGEVSTFCLRHLNDGIEVSPINTXIVLIPKKVNSTNLSHFCPISLCNIVYKILTKAIANRFRGVLEKCIDNAXSAFVPGRQISGNVLLAYEI

SEQ ID NO: 117055 - protein, 54 aa, Gossypium hirsutum
  unsure (1)..(54): unsure at all Xaa locations
  Clone ID: AI054564.1.pep
GTYFKTTYFSIDXSFSFSIYMMXXNQNQLTPLRIEIMNHIFMELSQEVFRLQXK

SEQ ID NO: 117056 - protein, 142 aa, Gossypium hirsutum
  unsure (1)..(142): unsure at all Xaa locations
  Clone ID: AI054559.1.pep
XVQXXQVSLLLKCXCCYDANXVTVNNETHVCYYIHIQGCTXEXDQILSHKXICHSLKVGASIITLQATFYLQAMVREKMGIFKFTANVIQTSGDNQVFFLPFKFTXSRIHFQGYLSSSTLXFYFLTLLLKITVXWRAIVADY

SEQ ID NO: 117057 - protein, 55 aa, Gossypium hirsutum
  unsure (1)..(55): unsure at all Xaa locations
  Clone ID: AI054558.1.pep
QXMSIIHIAVSSEIGLETFHILLSNLKPLEDIXIIXDLIPTCIAIEYTGSCCQAA

SEQ ID NO: 117058 - protein, 161 aa, Gossypium hirsutum
  Clone ID: AI054555.1.pep
MMKQHVGADELGGNTGEVTATLNSSVSSSSSEAGCEEDSDKSKKDGQPKGSDDGGESSKKGNKAKMKGEKKQREPRFAFVTKSEVDQLEDGYRWRKYGQKAVKNSPYPRFGSFVFLIYNQTHMLKIILSFRQSTKETTCEIVSETLILHYIFLAPSLTCTR

SEQ ID NO: 117059 - protein, 190 aa, Gossypium hirsutum
  unsure (1)..(190): unsure at all Xaa locations
  Clone ID: AI054552.1.pep
DKATKLMQLAKLTPEDMKAINNMKYLGGSPQSKKSSSGFSLKFDGGQKTKHAARKDRTGEEEETWQLFRFYPMLEELLENLNKGQLPKDEYACMNEPAKDSKSQRSTNSTAPNGRRPAHSMRSRRTQXWARILKNVXPDFRRMXQRNFXVIIGGATRSXGKIAAVALLPLHQDLISPSATGSDMYKLSGI

SEQ ID NO: 117060 - protein, 171 aa, Gossypium hirsutum
  unsure (1)..(171): unsure at all Xaa locations
  Clone ID: AI054548.1.pep
RDPVTLCTGQTYERSNIVKWFSLGHYTCPTTMQELWDDSVTPNKTLQQLIYSWFSQKYLAMKKRSEDVQGRVKEVLENLKKVKGQARVQALKELRQVVQAHGTALKTVVENGGIAFIXSLLGPFTXSCCGSXVIGILVNLNLDLNSKSDFVQPAKIXLIVDIXNEGSTETR

SEQ ID NO: 117061 - protein, 54 aa, Gossypium hirsutum
  unsure (1)..(54): unsure at all Xaa locations
  Clone ID: AI054543.1.pep
KAVYVKTHCCXAQISTLDCCQRMKXQSPPLRVSSFFCFXSQKGDSXXNKRSIPS

SEQ ID NO: 117062 - protein, 66 aa, Gossypium hirsutum
  Clone ID: AI054536.1.pep
PHGLRHGRVSQPCEGHGLETRACDPVSWEIFLSFPESFQSSQFSLKLIPMYVLGFVDPIKGRHACV

SEQ ID NO: 117063 - protein, 174 aa, Gossypium hirsutum
  unsure (1)..(174): unsure at all Xaa locations
  Clone ID: AI054533.1.pep
LNLLLVCSMLQVFPLPLAQTICSEADRAALLGFKAKILKDSTDSLSSWVGKDCCGGDWEGVGCNPTGRVNTLALQRPERDSTLYMKGTLSSSLGSLQFLEVLVISGMKFITGPIPESLSNLSRLKQLVLEDNSLQGNIXFSLGRLSFLQXXSWAGNHFXGVVPLSYGIENPMWN

SEQ ID NO: 117064 - protein, 55 aa, Gossypium hirsutum
  Clone ID: AI054529.1.pep
LKANVYTASQKKEHNTIMKTKKQQKRKGINQIWIQLNKYARTDMQTHKHIAYLYK

SEQ ID NO: 117065 - protein, 167 aa, Gossypium hirsutum
  unsure (1)..(167): unsure at all Xaa locations
  Clone ID: AI054523.1.pep
MGIHKESFLCSTMVEEPINSERLALIINLFLQCPQAWTXHENNQLLSLVDPXLLEFNEDEALRVIGVAFLCTQGSPLMRPPMSRVVGMLAGDFEVSKVTTKPSYITDWAYKDITRSFMKEESQTSNASDHSSNNVKSNNKTTVGTDDQPIHSPVNITEFQEIIGEGR

SEQ ID NO: 117066 - protein, 68 aa, Gossypium hirsutum
  unsure (1)..(68): unsure at all Xaa locations
  Clone ID: AI054520.1.pep
NETACEIGKKWCRKYKFERTWGQQFQRRNFINIRLYLNXNYMRIVEKIIIKRYMLLTSLIINIYSLIF

SEQ ID NO: 117067 - protein, 61 aa, Gossypium hirsutum
  Clone ID: AI054519.1.pep
SVEVSIIESDALLELQCGYREGLLLDIMQMLREKLRIEITAVQSSLNNGFFTAELRAKVNN

SEQ ID NO: 117068 - protein, 61 aa, Gossypium hirsutum
  unsure (1)..(61): unsure at all Xaa locations
  Clone ID: AI054510.1.pep
VHTAGALXCDGRAWCMPLKKSYSRSMTLAKQLTLLELGDKFHRGNPTCGEFVDSTDDLKDV

SEQ ID NO: 117069 - protein, 96 aa, Gossypium hirsutum
  unsure (1)..(96): unsure at all Xaa locations
  Clone ID: AI054509.1.pep
QADSPLQWLGTPSHAMKXTLXLGNLQNVYNXSHFNHYXSXSPLLDLGCHIFILSLKFFQIVSTAFCGAIEKGSVQHSHFNFSYSESEYVRDKAGAE

SEQ ID NO: 117070 - protein, 168 aa, Gossypium hirsutum
  unsure (1)..(168): unsure at all Xaa locations
  Clone ID: AI054508.1.pep
VKVSFEDLEFIAQNCRNLASVKISDCEILDLVGFFHAASVLEEFCGGSFNEQPERYTAVSFPPRLCRLGLTYMGKNEMPIVFPFASLLKKLDLLYALLDPEDHCLLIQRCPXXKVLETXNVIGDRGXXKFSLESCKRLXRLKIXRGADEQDCMMKRLFKRIMGLLRMS

SEQ ID NO: 117071 - protein, 224 aa, Gossypium hirsutum
  unsure (1)..(224): unsure at all Xaa locations
  Clone ID: AI054506.1.pep
IPLTSDNVVIFPSRTVAIENALRLFSPRLAIVDEHLTRNLPRKWLTSLAVETAETGLSEDVLTVIDAPRQSDLMVELIKKLKPQVVVTGIAHFXSVTSSAFVQLLDATREIGSRLFLDISDHFDLSSFXVTNGVLKYLSGTPLPSXAXILCGLGKNQVYSDXKVAFVISKDEAIXKSLVKXCRRYLKGITXLISPYYYGHLVHELLSLQLTNRHSLTRSESSNQ

SEQ ID NO: 117072 - protein, 67 aa, Gossypium hirsutum
  Clone ID: AI054504.1.pep
LQSLYELFTAKINNLDLFSIPIVECLVYLMTASGFRIYGYMIMCVESFCYPKACLYSMYIHYLCLVI

SEQ ID NO: 117073 - protein, 89 aa, Gossypium hirsutum
  unsure (1)..(89): unsure at all Xaa locations
  Clone ID: AI054501.1.pep
FPGNFGRSCGGTVWERIAVVPLVESTSENYGIRDNXNVNRIXCVGSRALWLWRKACVKMXCGXGELRHGCHLAERGDXRWRPGGEGSAE

SEQ ID NO: 117074 - protein, 176 aa, Gossypium hirsutum
  unsure (1)..(176): unsure at all Xaa locations
  Clone ID: AI054489.1.pep
EVLKVQDAIFANRDVPAAGMAGTFGGLNILWRPNGPRCNQLCKLVICEIMSKQSLDACYVLRQREVRRMVKEIHGKVGSSVNIYKQLSATALRVMMSTLWGXXPSQDLIEFRKRLDEIIMTFATPNVSDFFPILAPFDLQGIESKRRALSWFMGVINDKTENIMMERKTNSKYAQL

SEQ ID NO: 117075 - protein, 127 aa, Gossypium hirsutum
  unsure (1)..(127): unsure at all Xaa locations
  Clone ID: AI054488.1.pep
PAQIDPELENAFICHLHDHWFCIRKVNGEWXNFNSLYTAPEHFSKFYLSAYLDSLQGAGWSVFLVRGNFSKEFHISSTEAFNSXGQWLSPEDAERITKSSDVTTPRGSTSSNPDAELPKRPMTRAWA

SEQ ID NO: 117076 - protein, 137 aa, Gossypium hirsutum
  unsure (1)..(137): unsure at all Xaa locations
  Clone ID: AI054486.1.pep
ETSKVLKAVQLKPVQTKPFVEQFSQNDKVGKQSSTPRVKFNISEKPVPKKLPITVNGKIDFHKTQNITVNGVSKDSIHVDKNKKDMLPLMNRNVIDKSRKVDTAGSEKSQPFALTNGNSMKSDPFELMVAVDGQLGX

SEQ ID NO: 117077 - protein, 159 aa, Gossypium hirsutum
  unsure (1)..(159): unsure at all Xaa locations
  Clone ID: AI054484.1.pep
VLLWCFFIFTATSVNLVCSRSPQKYHTALFVFGDSLYDPGNNNYIDTLIKANYYPYGETFFKYPTGRFSDGRIIADFIAQFANLPLIPPYLQPGNHEFTYGVNFASAGAGALSETYKGYVIDLXNYIRLFKXVIXLMRKELGDAEATVIFSKAVYLINI

SEQ ID NO: 117078 - protein, 141 aa, Gossypium hirsutum
  unsure (1)..(141): unsure at all Xaa locations
  Clone ID: AI054481.1.pep
RNKYYVGAKLEDTILVGKRVKFVMNTGLMEGSGQLAYGGSFEACFRGRDYPVRNDNLSLTMTALSFRKETVLGGGFESEFRPLRGMKLSINGNINSQKMGXXRVKMSGSDHVEIALVAVFSXFKALLRRKATGNRDLEAGV

SEQ ID NO: 117079 - protein, 125 aa, Gossypium hirsutum
  Clone ID: AI054477.1.pep
AVGTELLVFGKEVTFQVIYRYSILTNSWTTGTSMNAPRCLFGSASLGEIAILAGGCDSQGNILSSAEMYNSETQKWETLPSMNKPMKMCCGVFMDKKFYVIVGIGGTFKDATVLSCGEEYDIYIM

SEQ ID NO: 117080 - protein, 214 aa, Gossypium hirsutum
  unsure (1)..(214): unsure at all Xaa locations
  Clone ID: AI054475.1.pep
TMGYGLPAAIGAKVARPDCTVIDIDGDSSFSMTLTELSTAAEFNIGVKVIILNNEEQGMVTQWQTLFYTDRFAHTHQRNADFVKLGDAMGVQAKRCIKPEELEDSLKWLLESDGPALWRVVTDQKVXPVLPMVPDXSGLHEFMIYDEKTIKDRRKQTRSDPVVKAILVMDSRGTSFYILGSHRRLFLLLAIILASVLWMFSLFEVVNKANYLYL

SEQ ID NO: 117081 - protein, 182 aa, Gossypium hirsutum
  unsure (1)..(182): unsure at all Xaa locations
  Clone ID: AI054467.1.pep
KWKSAMDEEMQSLLKNNTWELAQLPKGKRAIGCKWVFAKKDGSPSKKDIRYKERLVAKGYAQKEGIDYNDVFSPVVKHSSIRILLTLVAQLNLELAQLDVKTAFLHGELEEEIYMTHPEGYTDAGGRNWXCKLNXSLYGLKQSPMQWYKRFVAYEKLEVTRGNLTMCLFAELLTDLYLSTLL

SEQ ID NO: 117082 - protein, 81 aa, Gossypium hirsutum
  unsure (1)..(81): unsure at all Xaa locations
  Clone ID: AI054466.1.pep
EXRKNLNSIFSEIYPLPSPINTMHQXLVHHPSYLISLLSLGISLHSISLFLPLHSRPFPFPSFXQHKXFQKHCLTSHLGNX

SEQ ID NO: 117083 - protein, 115 aa, Gossypium hirsutum
  unsure (1)..(115): unsure at all Xaa locations
  Clone ID: AI054463.1.pep
CGPITGLVVQPCVGIWSDKCTSKYGRRRPFILAGSLMISLSXIGYILGDTMEHCSTFKGTRTRAAFVFVIGFWMLDLANXTVQGPARALLADLSGPDQHNSSNAIFCLWMAGGNI

SEQ ID NO: 117084 - protein, 74 aa, Gossypium hirsutum
  Clone ID: AI054462.1.pep
EVSPRYMNIMNMVTEIQRENSSFNVQIMGVTVEANLAVNVAFPILVNARSTSSLTILRNIGSIDEQSLCILSTF

SEQ ID NO: 117085 - protein, 67 aa, Gossypium hirsutum
  Clone ID: AI054453.1.pep
DKQPLLETPGEVFELKKLLPASMPYDFNIHVMDFQPGEFLNVKEVHYNQHGLLLLEGQGIYRLGNSW

SEQ ID NO: 117086 - protein, 177 aa, Gossypium hirsutum
  unsure (1)..(177): unsure at all Xaa locations
  Clone ID: AI054452.1.pep
MRTKFSCGLLGGFLLLSSLVSLSLSYSADDVSSRRLLKATSNRGIQQYLIPHNKLRAERGLPPLKWSKKLANYASWWAHKRQGDCRLIHSNSNYGENLFWGSGKDWKPRDXAVTAXAAEKRNYNRKTNSCRXNXECLHYTQIYGETAEXGLAXVVCXTGDHYXLYYDPLGCDQKPSS

SEQ ID NO: 117087 - protein, 43 aa, Gossypium hirsutum
  Clone ID: AI054448.1.pep
LTHNMLDLIHTHWKRRRVCKIKCKGVPTVDMDNVCRHIEVIVF

SEQ ID NO: 117088 - protein, 101 aa, Gossypium hirsutum
  Clone ID: AI054445.1.pep
SFSAIFFFLYFVSVFMMLPTKRPAPDHGDDESYELMVPEPKRRTSLKNIRNIMGVGGLSFNKIVLNLEPMLRIWVHEAVEAAIRSSIHPSSRPSLNRIEAS

SEQ ID NO: 117089 - protein, 105 aa, Gossypium hirsutum
  Clone ID: AF064464.1.pep
PSKPKSLISLSCATPRSSLFRFYGDTVAPATHAPLPNKVPVNVISLFIEKLSLADSQRRPKQELMQKVLQLRMELVNGVYSSGEVVQILEGRGDWLLGCYEYQGG

SEQ ID NO: 117090 - protein, 150 aa, Gossypium hirsutum
  Clone ID: AI732047.1.pep
MSSNSNSLQNYPTPLSPPLPSISKDIELARAMSASSKSSLFGLSRSDILYEDEWLIAVNKPQGIYCDTILASVPRFLSDSAPSDRLCEGNQASTLELHLANRLDRDTSGVMVITKSHKVASVLVKAFTNHKVQKTYVAFCIGSAPKSERK

SEQ ID NO: 117091 - protein, 169 aa, Gossypium hirsutum
  unsure (1)..(169): unsure at all Xaa locations
  Clone ID: AI732044.1.pep
IGTFYETPMVNHEREQTRPDVLQPAKPVAAAGYGMYGAACTLVLRSGKRINGFTRDPSLGXFTRTRPYIEIPXKRRINTAADVDTTTRDRPAAVYVKNCLFPKDSPTSKSLKIIGFIVSDVHRSCPYGVTLLFPADAKXPLVISLVLXIIFPMSFLMENAGGHAFTGTS

SEQ ID NO: 117092 - protein, 146 aa, Gossypium hirsutum
  Clone ID: AI732015.1.pep
AGFIWGVSNILMALCFLAMLVLSYVANHLDYIGHGLPPVGIVIGALVIFSFLGIPLAITYSVPYALISSRIESLGLGQGLSMGVLNLAIVIPQVVVSLGSGPWDQLFGGGNSPAFAVAGVAALTGGLVAILAIPRSISQKPRVVLP

SEQ ID NO: 117093 - protein, 210 aa, Gossypium hirsutum
  unsure (1)..(210): unsure at all Xaa locations
  Clone ID: AI732007.1.pep
RRESRQSNERRXPRTRKRRERRRQETNGGKQTRTRQQPRGAAGKRRRGTTAEKARGRSREPSRKRRKTRTRPHARGRGXATRRKTRPRETPPPREEEETKGTRTGRARERQRGTGHKRRHGHGKTXHHPTRTAAAKRREGKGAGQRQRRRRRREGHSGQRRGAQNQRARPASPTQNKARKPRDAKNERRGRGGPHPRREKGGENRRGRDG

SEQ ID NO: 117094 - protein, 230 aa, Gossypium hirsutum
  unsure (1)..(230): unsure at all Xaa locations
  Clone ID: AI732001.1.pep
ASEMVVALEYLHMLGIVYRDLKPENVLVRSDGHIMLTDFDLSLKCDESTSTPQIISNKKPLLPAPQNVYPIHQLPFISSSCIIPNCIVSAVSCFHPKRKRKKKSSHRGGPEFVAEPMDVRSMSFVGTHEYLAPEIVSGEGHGXPVDWWTLGIFMYELFYGVTPFKGVYHELTLXNIVARALEFPQKPTIPHAGKDLIHHLLVKDPAKRLGSTMGASAIXPHPXFFHGVHW

SEQ ID NO: 117095 - protein, 82 aa, Gossypium hirsutum
  unsure (1)..(82): unsure at all Xaa locations
  Clone ID: AI731992.1.pep
NVPSDAAGLNDQKNLLTYGGIGGYSGMGSNGMPMGGVGSVGGMTGLGGTGGMGAMVGVGMGAGXGNEGGVGIGNAPGVVHFP

SEQ ID NO: 117096 - protein, 92 aa, Gossypium hirsutum
  Clone ID: AI731986.1.pep
MWNSAENVFSRSASFREEDDEEEALRWAALERLPTYARVRRGIFRNMVGDSKEVDVSELELTDQRLLLERLVKSAEDDPEQFFDRMRKRIEA

SEQ ID NO: 117097 - protein, 60 aa, Gossypium hirsutum
  Clone ID: AI731983.1.pep
NFNNRSDHDQGNVEGLGGGGGGSVAGGERGNLTAVVEETVKSCLTPVFKELLGSLIGGGG

SEQ ID NO: 117098 - protein, 189 aa, Gossypium hirsutum
  unsure (1)..(189): unsure at all Xaa locations
  Clone ID: AI731981.1.pep
PICTFSAEELSEATKGYDVGQEISRYVHFVLYKGFLRGRELSVKRYGSYNKCLETAITDIVISSQMSVHKNVLKLIGCCLETQNPVLVYEYGGEKNLQRLMFDVSDGQLEPLTWKSRIKIAMDIANAVAYLHTALSRPVIHRGLSLISIVIDTNYVAKLADFSLSVAIPKGKSHVVEDAISGVVGYIXP

SEQ ID NO: 117099 - protein, 185 aa, Gossypium hirsutum
  unsure (1)..(185): unsure at all Xaa locations
  Clone ID: AI731979.1.pep
QFLVANSAERHYDQQLIVATTLPGRPRTLSPMETNLRITSDAHVHLCPYNCEVXMDRGLFQPPYDRIYLPELGMSXDKFQLVTRVGFASYTPRDINVRSAPTDGPMAVLNFAPHPVRRVSPGSATPGASTKVLMTSFTEPRLLILTYRWTYHXPVIDPTLGYTPTNVXFDLHSPMEHVHIGIPAH

SEQ ID NO: 117100 - protein, 175 aa, Gossypium hirsutum
  unsure (1)..(175): unsure at all Xaa locations
  Clone ID: AI731967.1.pep
MAGKQIGGEGLPANIAGMSKNQLYEIMSQMKTLIEQNQQQAKEILIQNPLLTKALFQAQIMLGMVXPPQVIPTIQPPTSQQSQCQQSAQPPPMPNIQPAKSMPGQPGLQDQVAPSQTQPPLRKQHQNPAXAHISTAAIPPASIQSQPTPSHSLQTPQQMKGHLNPPMSLPPSSQL

SEQ ID NO: 117101 - protein, 90 aa, Gossypium hirsutum
  unsure (1)..(90): unsure at all Xaa locations
  Clone ID: AI731961.1.pep
RIPIWWRWYYWANPIAWSLYGLVISXYGDDDKLVALSNGVDSMPTRVLLKEVFGYRHDFLCVTAVMVGFFVIFFAXIFGFAIKAFNFQRR

SEQ ID NO: 117102 - protein, 193 aa, Gossypium hirsutum
  unsure (1)..(193): unsure at all Xaa locations
  Clone ID: AI731956.1.pep
LPSLTVIEPRYFDLKGLPANDDHPSHDVANGQKLVKEVYEILRASPQWNQTLLVITYDEHGGFYDHVHTPYINVPSPDGNTGPAPSFFKFDRLGVRVPTIMVSPWIKKGTVISGPKGPFPNSEFEHSSIPATIKKMCNLSSNFLTHRDAWAGTFERVVXKLSSPXTEWPQKYPRPPPEEHSSQPKTLVSPNFK

SEQ ID NO: 117103 - protein, 150 aa, Gossypium hirsutum
  unsure (1)..(150): unsure at all Xaa locations
  Clone ID: AI731954.1.pep
KLVHLHYSPSFHLQPLNSLKTNQKSRSAAAIPSKQLSLAPSFCSCCGRRHFIEAATAVLLPISPSKSNASTSVPESNLDESVRTNHIPRQMSDQSWYMNPKFSILIGGVLPVGAVFIYLFIILGSVWRIQFNEIGRVLFLIFMMXIITCA

SEQ ID NO: 117104 - protein, 176 aa, Gossypium hirsutum
  Clone ID: AI731939.1.pep
QKGGDGNRFQASVSKGANHPCANFTFPPPPPPHLRRIGPRPCPVCYLPVDQAIASMPSSPSESPVLHNLTYVHDENPIKTEPHGGSDFGGYPSLKQRNDSFDIKESMVVHCGFVKGSKPGHQTGFDFDESDLAGLQQFHEIIVASAIFGNYDLIQQPRNISEEAKRNVPFYMFIDE

SEQ ID NO: 117105 - protein, 205 aa, Gossypium hirsutum
  unsure (1)..(205): unsure at all Xaa locations
  Clone ID: AI731936.1.pep
SVCPLCKAEPEDSHHLLWYCXTLRQLWFYLKLPMRFGDLSSDGTTNFVQAFLXMNMNARQLSAISLWALWYKRNKIVYEGLKFELFEVVGFIQGYFQEFTRAKARELTAGIKRDVAWRPPQSGIIKLNFDASFMSISNCSISAVLARDSEGLIMGACTYPVVDIADAFVAEARAGERALLFALDMGFRKVILEGDSLTVIKKLIS

SEQ ID NO: 117106 - protein, 240 aa, Gossypium hirsutum
  unsure (1)..(240): unsure at all Xaa locations
  Clone ID: AI731935.1.pep
LLPSLSSRRIDNLISIRHEAPDHAIEDLLLNCGSGCDFYRHPGGGVGGTAPHLKSPREDASCHWEPFPYSPRTTPLTRRASAPPGRSRRFGPAVGPPGLPSPPLPGEPGTPSSPRVSGFFSPAASLVFRSSPLLSPSRLRPLSHHMPPGPVVPSRSRAPSLPPLPPTPVPPRLPPPLPXAPPAPRSYPLPLPARAFPLSLRARAPGLLPVPLSVSGGALLPPSPSPTSRPGPASSLLPSA

SEQ ID NO: 117107 - protein, 188 aa, Gossypium hirsutum
  unsure (1)..(188): unsure at all Xaa locations
  Clone ID: AI731927.1.pep
QYEPWERPSTRDLVATLAPLQTKPDVPSYVMLGISKYEEAPPTPQRALSPMGEACSRHDLTAIHQILVMNHYKDDEGSNELSFQEWTQQMRDMLEARKRGDYAFRDKDFKTAIDCYSQFINVGTMVSSTVFARRXLCYLFCDQPNAALADAMQAQIVNPDWPTAFYMQSVALAKLDMQKDAADMLNEA

SEQ ID NO: 117108 - protein, 198 aa, Gossypium hirsutum
  unsure (1)..(198): unsure at all Xaa locations
  Clone ID: AI731913.1.pep
SIFADVCNLLAMAFVVKEDLQQAIGGKFSFRDRKAFTDNLGGLPFAGGMAVYCFEGFGMTLALEQSMRERRTFPKVLAMSFTWITLVYILFGIFGYMAYGDETKDIITLNLPKDWTAIAVQIGLCLGLAFTFPIMVHPVSEILEGKLKKNIWFEKLRNNDAEDSITRLEKLGIYMGRTXLVIVLAVLASFVPGFGVFV

SEQ ID NO: 117109 - protein, 232 aa, Gossypium hirsutum
  unsure (1)..(232): unsure at all Xaa locations
  Clone ID: AI731891.1.pep
GGAARANRSQRRGTAGGAARSKGAEEGERNARRTXGREPEEGQRGGPRGRPADGGGAGRGGEEAGGAGGAREGGGSERDHRDGGGDRRGASTASESSPTPRXPEGRPERRGRGQPGRKDXRRRGRNPSRRTTDEPRAGTEPAPRRHGRHQPKRGRRRNRKHTGQPPEERAKRAQGQDDRRSESSAEXDERGNAPEEHRQGRGNPRRGTAAPPRQEEATTSPHPRGVGGTKCV

SEQ ID NO: 117110 - protein, 224 aa, Gossypium hirsutum
  unsure (1)..(224): unsure at all Xaa locations
  Clone ID: AI731885.1.pep
SLYKLSLDETRFAPTLNLVWENCDKNVAMDDKKDGSFVSYPESEVFEFWKIVKDGLALPLLINLCDKTGLALPVCLIRLPAELKVKILESLPGADIARMECVCLEMRYLASNNDLWKQKFKEEFGCTSGTVXTGNWKKMFISCWESRKKRNPAITRWQGFARVDNKPLYFPIWRDPNPFFPSFGVPHIIGGEHDASPFVAPHPYMPCVHQHPFRRRQNFRHHCR

SEQ ID NO: 117111 - protein, 208 aa, Gossypium hirsutum
  Clone ID: AI731861.1.pep
GASALVKSVHPKWTSSMIRSALMTTATVYDNMRKPVTNGSASFATPHEMGVGEIIPVKALNPGLVFETTTEDYLRFLCYNGSPEKTIRSMSKTKFKCPTKSSDDLISNINYPSISISKLEKSIGFLTIKRSVTNVGHPNVTYTSTVQAPMGMKVKVIPKKITFLENVKKVSFKVLFDGSEASSGYNFGSITWSAAQYSVRTVFAVNVE

SEQ ID NO: 117112 - protein, 211 aa, Gossypium hirsutum
  unsure (1)..(211): unsure at all Xaa locations
  Clone ID: AI731846.1.pep
PHIGYVSNDVCLDSDNCNVLFNIXQQTPDIAHSVYGPFTNRPQHIGARYTCHMSGYATDETPXYMPLRHVLSTKLGARLXTEVXKNVLVYLEPECKTQVTVXXYDYKVAMVPVRVHTVLISTRHNETVTNNDTAAELKEHVILPVIPQKXSHSNNNFHLDPSRRFVIAGTHXXARLTRRNIDIXTYSGWGTHGAGAFSGQDPTNVECSGSS

SEQ ID NO: 117113 - protein, 216 aa, Gossypium hirsutum
  unsure (1)..(216): unsure at all Xaa locations
  Clone ID: AI731844.1.pep
VNPLLPKVLSLLVSFIKRPHQSLAGIGIAAFVRLMTNSGDLFLEEKWLEVVSSIRKAVNATLPDFSYFVSGDITLEGDGHVLNDQSNEASHGIDTSRGDSESLGKQRLYASLSDTKCRAAIQLLLIQATMEIYNMHRTRISAKNILFLVDAMHDVAXHAHGINNDAILRTKLLKFGRMTQMHDPPLLRFQNESYQFCLTFLHNLILDRPPSLEEPN

SEQ ID NO: 117114 - protein, 158 aa, Gossypium hirsutum
  unsure (1)..(158): unsure at all Xaa locations
  Clone ID: AI731842.1.pep
MVDIDFHHPLFLHPSDTPGTILISHRLTGVENYSVWSRLLRIALLAKNKLGFVDGDCRRSTYPDSLRAQWDRCNAFVLSWILNTMSPDLSTGLVFASDSAAVWTDLXDHFXKVDGSRIFFLHQSIAHFTQGDATVSSYFTQLKLLWDEYTALVPFFTC

SEQ ID NO: 117115 - protein, 220 aa, Gossypium hirsutum
  unsure (1)..(220): unsure at all Xaa locations
  Clone ID: AI731840.1.pep
AMVARGDLGAQIPLEQVPSAQQNIVQLCRQLNKPVIVASQLLESMIEYPTPTRAEVADVSEAVRQQADALMLSGESAMGQYPEKALAVLRSVTVKIEKWWREEKCHEAMELPHVXTLFADSISEEICDSAAKIANNLEADALFVYTKTGHMASLLSQCRPNCPIFAFTTTTSVRRRLKLQWGLITFRLSFYDNMDANLNKTFSLLQAQGMIKSGEPVIPV

SEQ ID NO: 117116 - protein, 50 aa, Gossypium hirsutum
  Clone ID: AI731835.1.pep
HKWNAWRAALKHRYFNNPWAIVSFFAACILLVLTFAQTLYGVYGYYRPSS

SEQ ID NO: 117117 - protein, 148 aa, Gossypium hirsutum
  Clone ID: AI731817.1.pep
MVLCTKLHRLDLRSTFFTSLRPSFTPNPSSSVSPKTFKFRPTKITAQVSTLSVETSVKDPESDIESLFSSNTEEIDRKRSNKQSNTGASGISSGVKLENISKSYKGVTVLKDVSWEVKKGEKVGLVGVNGAGKTTQMRIITGQEETDS

SEQ ID NO: 117118 - protein, 185 aa, Gossypium hirsutum
  unsure (1)..(185): unsure at all Xaa locations
  Clone ID: AI731813.1.pep
GHVSAAWKLHYYXWVMQLFEQYNISEGACQFALAALEQVDDLGLGGDGFERDSSNESTTTIKGRLWANVFKFTLDLNLLNDAYCAIISNPDEESKYICLRRFVIVLYECGAIKILCNGQLPLIGLADKVERELAWKAERTDILAKPNPYKLLYAFEIHRHNWRKAAIYMYLYSARLRTDTVQKDH

SEQ ID NO: 117119 - protein, 187 aa, Gossypium hirsutum
  Clone ID: AI731812.1.pep
SAPPPSTTPSPPPPSTSSPPPSSSASPPPPATESPPPSSSNPSPPPPSSSTPSPPPPPRSPGTASPPPPPRNSGTPSPPPPPSDSSNETPTGLIVGVAIGGVAILLVLGLLFLCCPKKRRRRDEESYYMPPPPTGPKDDPYGGQQYRWQQNPPPRVEQFGAVAPKPIPPPVTAWRPPSPGQSSTPPP

SEQ ID NO: 117120 - protein, 78 aa, Gossypium hirsutum
  Clone ID: AI731772.1.pep
MRRGRGKAKKQNVVSSLEDPGSGEDEKIPAYKRRGRPQKQMKDDIDEDEAEKVEEDGEDIKVSVLTKEMKNQAVPENG

SEQ ID NO: 117121 - protein, 191 aa, Gossypium hirsutum
  unsure (1)..(191): unsure at all Xaa locations
  Clone ID: AI731763.1.pep
GRERKKDNEDGPRAEEREKGKEKNRTXESAKPAQPETRGGKRQERRERRTKTERIREAEGSGRQRENNPRGAGERRTQRGREREKRKKEQRGQKMGRPGRQPRNKKEKREERRSADARPEGKKRSAAERRGKTEGNDRREGRKRQNTKRVKEEEEEAEGRGKETRHRTVPPLTTGLSKHLGRFIRMRTFLV

SEQ ID NO: 117122 - protein, 199 aa, Gossypium hirsutum
  unsure (1)..(199): unsure at all Xaa locations
  Clone ID: AI731744.1.pep
VEAQKKIEAAIRQKGIDENWAAALEHNPEGFARVVMLYVDMEVNGVPLKAFVDSGAQSTIISKSCAERCGLLRLLDQRYKGIAHGVGQSEILGRIHVAPIKIGNIFFPCSFVVLDSPNMEFLFGLDMLRKHQCIIDLKENVLKVGGGEVSVPFLQEKDIPYNFLNEERHSXHGSSLGPAIXTGTTEKNANVQSGGQPSG

SEQ ID NO: 117123 - protein, 202 aa, Gossypium hirsutum
  Clone ID: AI731733.1.pep
DKRPQDLMLSYVSGEKGKDRSDRELVTPWFKFLWETYRTVLEILRNNSKLEALYAMTAHRAFQFCKQYKRTTEFRRLCEIIRNHLANLNKYKDQRDRPDLSAPESLQLYLDTRFEQLKIATELGLWQEAFRSVEDIHGLMSIVKKTPKASLMVVYYAKLTEIFWISSSHLYHAYAWLNLFSLQKSFNKNLSQKDLQLMMLST

SEQ ID NO: 117124 - protein, 159 aa, Gossypium hirsutum
  unsure (1)..(159): unsure at all Xaa locations
  Clone ID: AI731729.1.pep
CFVLCPFASQSVFGETNNASSNQFAPKPSFGSXPPFAFQTGSSIFGGSSTEVFGAAQFSSPFLSTTAFGASSSPAFGSYMPAFGSSSSPAFGSSSASFGGSSVFGQKPAFGFGSTPTQSSPFGITACIWFPDTISHSAFGSSTSAFAAASTPAFGVTST

SEQ ID NO: 117125 - protein, 206 aa, Gossypium hirsutum
  Clone ID: AI731715.1.pep
EVLLQSSYYTPAIDMWAVGAILAELFTLSPIFPGESEIDQLYKICCVLGAPDWTSFPEATNISRLINISYSEISLTNLSDIMPNASSEAVDLISQLCSWDPLRRPTAEQALQHPFFNVDVHVPHPLLCDSLELRLNNMGTKPNLELNLWDFGTEPDDCFLGLTLAVKPSASNLEMVHTVSQSMEEDILFCPKLNDHPKQSVFWSLL

SEQ ID NO: 117126 - protein, 208 aa, Gossypium hirsutum
  unsure (1)..(208): unsure at all Xaa locations
  Clone ID: AI731714.1.pep
GKGKAAMEVFDKFADFGCVPNENSFYFTIEALCRRSFYDWGWSVCEKMLGEKSLPDGERVGKIISWFCKGGKAKEAHTVYLSAKGKNKVLPRSSVNFLIGSLCKKDEMVKLALEMLDGFSGDERKYAIKPFSAVVRGLCXTKNVDEAKNVILXMIEQGPPPGNAVFNSVVNGYSKAGDMEKANEVMELMETXGLXPDVYTYTVVMSGY

SEQ ID NO: 117127 - protein, 116 aa, Gossypium hirsutum
  Clone ID: AI731712.1.pep
AICMTAENIAKPIIEEQIPKYKIDAVKFEKLTLGSLPPTFQGMKVYVTDEKELIMEPLIKWAGNPDVTIAVKAFGLKATVQVVDLQVFALPRITLKPLVPSFPCFANIFVSLMEKV

SEQ ID NO: 117128 - protein, 208 aa, Gossypium hirsutum
  unsure (1)..(208): unsure at all Xaa locations
  Clone ID: AI731710.1.pep
LITKCKSAKKPLVVAGCVPQGSRNLKELEGVSIXGVQQIDRVVEVVEETLKGHEVRLLNRKTLPALDLPKVRKNKFVEILPINVGCLGACTYCKTKHARGHLGSYTVDSLVERVKTVIADGVREIWLSSEDTGAYGRDIGVNLPILLNAIVAELPPDGSTMLRIGMTNPPFILEHLXEIAAVLCHPCVYSFLHVPVQSGSDAVLTAMN

SEQ ID NO: 117129 - protein, 179 aa, Gossypium hirsutum
  unsure (1)..(179): unsure at all Xaa locations
  Clone ID: AI731708.1.pep
ATATYPPPPPFYRLYKDYLQNPKSAPEPPPPIEGTYVCFGGNYTTDDVLPSLEDQGVRQLYPKGPNIDFKKELRSLNRELQLHILELADVLVERPSQYARQVEEISLIFKNLHHLLNSLRPHQARATLIHILELQIQRRKKALEDIKRRREEARRLLXESLGNLNGQHFEFELFQITSL

SEQ ID NO: 117130 - protein, 203 aa, Gossypium hirsutum
  unsure (1)..(203): unsure at all Xaa locations
  Clone ID: AI731707.1.pep
MPRKPARHHRLLPVRPLTFSPFARSVARVATAYLVKHYMHNAVQQSAGDEFKEKLKIIGRHSESSEDEKFDGVVQADFAFFDPKPDDFHGVKTLLQSYLDNKQWDLSGFVNLILGQTTVGTVVXLKDDENHGIFSIITALNLGKYKDLKCFSKLKEFLLNICHEKKXNRNLRSPLGKXTXKMGLLGSQCVINLPPEISAPPFY

SEQ ID NO: 117131 - protein, 201 aa, Gossypium hirsutum
  unsure (1)..(201): unsure at all Xaa locations
  Clone ID: AI731696.1.pep
GKFIIPQISNIASIWFISLFLSIFATGILEMRWSGVGIDEWWKNEQFWVIGGVSAHLFAVFQGLLKVLAGIDTNFTVTSKASDEDGDFAKLYMFKWTTLLIPPTTLLIINLVGVVAGVSYAINSGYQSWGPLFGKLFFAFWVIIHLYPFLKGLMGRQNQMPTIVVVWAILLASIFSLLWVRIDPFTTKVTGPDVXQCGINC

SEQ ID NO: 117132 - protein, 170 aa, Gossypium hirsutum
  unsure (1)..(170): unsure at all Xaa locations
  Clone ID: AI731692.1.pep
KISAVYSSDLKRALVTAETIAAKCGGLEVITDPDLRERNLGELQGLVFREAAKLSPKAHKAFLSHRTDQDIPGGGESLGHLFQRCTSSLQRIGNKHKGERVVVVSHGGVIRSLYKRACPNGKSGGKVLNTSVNIFHLCDEEWTIKSWGDVSHLQQTGYLESGFGXDKTSG

SEQ ID NO: 117133 - protein, 141 aa, Gossypium hirsutum
  Clone ID: AI731669.1.pep
RNILWRPPKSGVIKLNFDASFTSNTNISISAVLARVLENHIIGDCTYPLLDVADAFVAEAIACETAFSFALDMGFRKVILEGDSPTVIKKLNSNIVDRSVLSPISQHICFLAGFFEEVTYLFIPKEANKSAHELAMDGQNR

SEQ ID NO: 117134 - protein, 196 aa, Gossypium hirsutum
  unsure (1)..(196): unsure at all Xaa locations
  Clone ID: AI731662.1.pep
TESDPFISSLEMLLLGDSLYNTTNFDSYALSLVVRHSFGHNRSLISYPDDLFDRYWEPYAENVSVIASNNTPSVSGFWNIPPSKIFESALSTDQLEPLELRWPPLSLPNSTYYIALYFADNRDSMLSSSRVLRIHINEVRYIXNLEVTSAGAAVFATRWPLEGQTKITLSSAANSNASPLINAGEIFDILPLGGRT

SEQ ID NO: 117135 - protein, 155 aa, Gossypium hirsutum
  Clone ID: AI731660.1.pep
MGNCCTRGDGSDKLEKAAAGYGNGDADPTVTSHQTSYRTAPSSQGASTVGKQSKPAPMGPVLGRPMEDVKATYTIGKELGRGQFGITHLCTHKTTGEQFACKTIAKRKLSSKEDVEDVRREVQIMHHLTGQPNIVELKGAYEDKHAVHLVMELCG

SEQ ID NO: 117136 - protein, 145 aa, Gossypium hirsutum
  Clone ID: AI731619.1.pep
MEKVEDQNPQQEEDQVVNPWEVSAKDGGKIDYDKLIDKFGCQRLDQSFVDRVQRLTSRPPHVFLRRGVFFAHRDFNDILDAYERGQKFYLYTGRGPSSEALHLGHLIPFMFTKYLQDAFKVPLVIQLTDDEKCMWKNLSVEESQR

SEQ ID NO: 117137 - protein, 161 aa, Gossypium hirsutum
  unsure (1)..(161): unsure at all Xaa locations
  Clone ID: AI731611.1.pep
MAGNLTTGGGKDLPGDMNRKSANTDSLVVCFGEFLIDFVPTVGGVSLAEAPAFQKAPGGAPANVAVCVSKLXGSSAFIGKVGDDEFGHMLXNILKKNYVDNTGMRFDQSARTALAFVTLKADGEREFLFFRHPSADMRLHESELDINLINKAKIFHYGSII

SEQ ID NO: 117138 - protein, 145 aa, Gossypium hirsutum
  unsure (1)..(145): unsure at all Xaa locations
  Clone ID: AI731601.1.pep
NTENNLSSQSPEANQTKTTNTYKRSLSGGLQSPRTEVPERAILQRINSKKAAKSYQLGHQLSRKWSTGAGPRIGCVXDYPLELRQQALEFVNLSPRTPPTLSPFLSPRTPRTPTTPSACRSPGGLASAASQPTSNFTNADGISGI

SEQ ID NO: 117139 - protein, 147 aa, Gossypium hirsutum
  unsure (1)..(147): unsure at all Xaa locations
  Clone ID: AI731600.1.pep
MFDGVPDHLHQFIGASSASARTTTTTTLLLPLSFTSSNGFTSFDPLFTSSSNSHHQQVPPQLHHHHHQQQQQQQQQQQQPQLLQSLHQQKNNEESTTSLVGMNMEINGRDQRSIAEPIDNLHHHHHPWSNDEVLALLKVKSXIKNWF

SEQ ID NO: 117140 - protein, 91 aa, Gossypium hirsutum
  Clone ID: AI731598.1.pep
TTFEIDLSRNMFQFDLSKVQFPKSLARLDLNHNKITGSIPAGLTDLELQFMNVSYNRLCGQIPVGGRLQSFDYSTYFHNRCLCGAPLDTCK

SEQ ID NO: 117141 - protein, 179 aa, Gossypium hirsutum
  Clone ID: AI731595.1.pep
MLRSLFFSPRIRRVAVLSSPLGPTLAMDNNNRSRTTDSSVQTNPRIQKLQQIVKTDASAGWEESWKQGVTPWDLGRPTPVILHLHHSGSLPMGRVLVPGCGTGYDVVAMACPGRYVVGLDISKEAIKKAKQMSSSLPNADNFTFIEADFFSWRPTDLFDLIFDYTFFCAILPEMRSAWA

SEQ ID NO: 117142 - protein, 186 aa, Gossypium hirsutum
  unsure (1)..(186): unsure at all Xaa locations
  Clone ID: AI731591.1.pep
NLENLQELILDRNKLQGTVPAASNSAFSAKMHGMYASHSNLTGLCRSSRLKVVDVSYNYLVGSIPKCLTNLPNASFQGNCLRDKDVKQRPSTQCGAFPSKSHQVPKSKHRPTEDVPKHQKESKPTWLLALEIATGITVGSLFLVALRTAFHKCNXKPAIIIPWKKSASEKEQLAVYVNSELLKDVT

SEQ ID NO: 117143 - protein, 194 aa, Gossypium hirsutum
  unsure (1)..(194): unsure at all Xaa locations
  Clone ID: AI731582.1.pep
EAAQSGDAQKVLELLEQGLDPCIKDQRGRTPYMLANEKEVRNTFRRFMASNLEKWDWNAAKVPSALTKEMEESQAAKQAEKESKRKARAKELKKLRKAREKKAEAEAAXSQKTVAVSQNQATVASVSKGWQSQSVGISRISKEEELKRAQALERXKRAAAAERRIAEAAATHSRDAQGSTTVGSTTNLQSKSGL

SEQ ID NO: 117144 - protein, 176 aa, Gossypium hirsutum
  unsure (1)..(176): unsure at all Xaa locations
  Clone ID: AI731577.1.pep
PKLKETISVANNACWAIGELAIKVRQEISPIVMTVISCLVPILQHAEGLNKSLVENSAITLGRLAWVCPNLVSPHMEHFMQSWCIALSMIRDDIEKEDAFRGLCAMVRANPSGALSSLVFMCKAIASWHEIRSEELHNEVCQVLHGYKQMLXNGAWDQCMSALEPPVKDKLSKYQV

SEQ ID NO: 117145 - protein, 199 aa, Gossypium hirsutum
  Clone ID: AI731575.1.pep
LATVEEEIVWLERKIDDLKMKLYQEKKLTQQWKIRQQQNQLICKPPRNDDDDLNQRTRTQNYDILRKRRIKSHRRASMGSASDILTLSSSQCSTEVNQRSKKLQTWRIQKQCPIINEKPNELSEELVRCLIGIFLELNQQGSQDKEGSAIVAKLSFSCMASRGYSAKNSLINLKSPIFGFNQNASNIDPYGIIPDFDGL

SEQ ID NO: 117146 - protein, 201 aa, Gossypium hirsutum
  Clone ID: AI731574.1.pep
KTSLPLRSTLHDSTNVEEEEVRKMVRECLELRDNYVYREEIAPWTKEPVMEPSVPKASCDPFHFEPVEKTAHHFRMEDGVVHVYASESGTVELFPVASSTTFFTDMHHLLKVMSAGNVRSACHHRLRFLEEKFRLHLLINADREFLAQKSAPHRDFYNIRKVDTHVHHSACMNQKHLLSFIKSKLRKEPDEVVIFRDGKYI

SEQ ID NO: 117147 - protein, 176 aa, Gossypium hirsutum
  unsure (1)..(176): unsure at all Xaa locations
  Clone ID: AI731554.1.pep
MSLTNKKKLILNTASISLGCRSCKKLKLTSVFNPKPKPQSPYNLSSSNSSNKTTPYNSMSEFGTPTSFSSHTTNQYWEMDIETDKEAMCSPPATTVRGLGRVGESLAVEKDSDDPYLDFRYSMLQMILEKQIYSXDELKELLNCFLHLNSSYYHGIILSAFTDIWNGLFSIKPGGG

SEQ ID NO: 117148 - protein, 183 aa, Gossypium hirsutum
  Clone ID: AI731547.1.pep
IQLAAKTVPKPLHCLSLQLSADYYFHGYYQTKQEPYNEKLEDPSLYHYAIFSDNVLATSVVVNSTVLHANEPEKHVFHIVTDKLNFAAMKMWFLVNSPRNATIQVDNIDDFKWMNSSYCSVLRQLESVRIKDYYFKANHPSTLSDGADHLKYRNPKYLSILNHLRFYLPEVHPKLDKILFLDD

SEQ ID NO: 117149 - protein, 78 aa, Gossypium hirsutum
  Clone ID: AI731546.1.pep
LPTVLLGIEVTLSYHVFFLSQIRVCITCTTRLPPSVSSSPEKPKSEYLGTILQMLSSSLIYITLFPPPHPQPLLPLHS

SEQ ID NO: 117150 - protein, 166 aa, Gossypium hirsutum
  Clone ID: AI731538.1.pep
LTILFSWLLWSGFLNNGNFEQAPKKENLNNTVIVGKYSLPGWEIKGLVEFVSGGPQPRGFYFAIPRGAHAARLGNEASISQKVEVKAGYVYSLTFGATRTCAQDEVLRISVPGQTTDISIQTLYSTDGGDTIALAFKAIAPIVIVTFHNPGIQEDPACGPLLDAIA

SEQ ID NO: 117151 - protein, 174 aa, Gossypium hirsutum
  unsure (1)..(174): unsure at all Xaa locations
  Clone ID: AI731528.1.pep
MDWTRGRTIGRGSTATVCVATVDQSRVFAVKSSELSLSESLRKEQRILSTLSCPHVVGYKGCDISSENGKLLYNLFLEYAPSGTVMDAIQKHGGYLEEATVRSYTRGILLGLEFLHSRGIXHCDIKGQNVLVTDDGVKIADLGCAXRADEASSAAWSIAGTPVYMAPEVARGEQ

SEQ ID NO: 117152 - protein, 193 aa, Gossypium hirsutum
  Clone ID: AI731519.1.pep
MTVTLNAYNVVAACCAAEYLKMTEDVDRGNLIFKIEVFLNSSIFRSWKDSIIVLQTTKSVLPWSENLKIVGRCIDSIASKISLDPAKITWSYTYNRKLSVSDKTAGDGMKFREKIVSVPKDWWVEDICELDIDLYKRVMTAVKSKGRMDGVAICEALKTYAVRWLPDSVDTLDSDVHSWRNKLLVETIVCLLL

SEQ ID NO: 117153 - protein, 96 aa, Gossypium hirsutum
  Clone ID: AI731511.1.pep
ALPIFLDSLVSAWGAILISVTLILMFGEIAPQAVCTRYGLAIGAKVAPFVRVLIWICFPVAYPISKLLDLLLGEGHEALFHRAELRTLVDLHGNEV

SEQ ID NO: 117154 - protein, 218 aa, Gossypium hirsutum
  unsure (1)..(218): unsure at all Xaa locations
  Clone ID: AI731504.1.pep
DNFSEANILGRGGFGIVYKGELHNGTQIAVKRMECAXKGTKGLNEFQAEIAVLTKVRHRHLVALLGYCINGNERLLVYEYMPQGTLGQHLFEWRENGYAPLTWKQRVTIALDVARGVEYLHSLAQQSFIHRDLKPNNILLXDDMRAKVADFGLVKNAPEGKYSLETRLAGTFGYLAPEYAATGRVTTKVDVYAFGVVLMEIITGRQALDVTLRDEKSL

SEQ ID NO: 117155 - protein, 200 aa, Gossypium hirsutum
  Clone ID: AI731503.1.pep
METVTHSSPFDSFLDRMRNPASLDLVRSIKSFIVSFSYTASNPETNGKRIQEFFQTMEDAIRDHPLWASSSDDETDNALEGLEKYVMTKLHSRTFASTPEDVKIDAEISEKISLLQTFLRPQHLDIPSALQNEAAWLLAEKELKKINAFKAPRDKLLCIINCSRVINNLLLNASISEDHVPGGADDFLPVLIYVTIKANP

SEQ ID NO: 117156 - protein, 219 aa, Gossypium hirsutum
  unsure (1)..(219): unsure at all Xaa locations
  Clone ID: AI731501.1.pep
TTDYFSMANKIGEGGFGAVYYANLRGEEAAIKKMDMQASKEFLAELKVLTRVHHLNLVRLIGYCVEGSLFLVYEYIENGNLSQHLRGSSREPLPWSTRVQIALDSARGLEYIHEHTVPVYIHRDIKSANILIDKKFRAKVADFGLTKLTEVGSASLPTRLVGTFGYMPPEYAQYGDVSPXIDVYAFGVVLYELISAKETIVKANGSLAESKGLVALFDG

SEQ ID NO: 117157 - protein, 221 aa, Gossypium hirsutum
  unsure (1)..(221): unsure at all Xaa locations
  Clone ID: AI731491.1.pep
TGTTGANEESSRSHAILQLAIXRSVDGNESXPPRVVGKLSFIDLAGSERGADTTDNDKQTRMEGAEINKSLLALKECIRALDNDQGHIPFRGSKLTEVLRDSFMGNSRTVMISCISPSSGSCEHTLNTLRYADRVKNLSKGGNPKKDALSSSLNLKESTARPLSSVLPTALTSEDYINDTWPDQNERDDFAASEDSYEPEKLMWKKNGKPDQYNFSISEDR

SEQ ID NO: 117158 - protein, 197 aa, Gossypium hirsutum
  unsure (1)..(197): unsure at all Xaa locations
  Clone ID: AI731475.1.pep
VVRTHKGADDKHYNCVYQREDDKGIIGVSLARELMAVAGEALKTNITTLGPLVLPFKEQFMFFVTLVRKKILKAKVIPYIPDFKLAFDHFCIHAGGRALLDELQKNLQLTDWHMEPSRMTLYRFGNTSSXSLWYELAYTEAKGRVSDGDRVWQIXFGSGFKCNNAVWRALRSTPMAESRGNPWKNEIEKYPVKVSFA

SEQ ID NO: 117159 - protein, 192 aa, Gossypium hirsutum
  unsure (1)..(192): unsure at all Xaa locations
  Clone ID: AI731448.1.pep
AQRKEDRQAQLQLQYAQRMPGLAGPSTVVLPGGYPPLYYASPTGIVSQVPLRPGMMHQPLGLRPGWRANGFAPPTRPVFQYSSLPLFPTAPRQTRPNRRQMNGNTLRGSHSVTYALQLQPPNQTVTSSKDQSNQQTGQAKSVPNGQGRKVNKGPGGGAAAAXLTQGTEMLSXMLAAASPEQQKTILGERLYP

SEQ ID NO: 117160 - protein, 193 aa, Gossypium hirsutum
  Clone ID: AI731443.1.pep
FVLEQIQDLKREISKARIRMMEPLLKGPAGLDYLRNAFQNRYGSPSDAGSSLPLTMRWLSSVWNCKDQEWGEHQNSVSTLKPQDSSSRDGQTPITLKTGGSYNSANASQMKFVNPSKVTDHEQPECNGDQVDMVVRLGLLNLVSGVSGLTLDFLPETFTLNLARLRGVQAEIQKIIVISTSILICRQIFSSEQ

SEQ ID NO: 117161 - protein, 180 aa, Gossypium hirsutum
  unsure (1)..(180): unsure at all Xaa locations
  Clone ID: AI731429.1.pep
NSARGIARASLTPESSYIAKPAASWLDDFLVWLAPEAFGCCRKFTNGSYCPPDDQPPCCSPNDTACGLSEVCKDCTTCFRHSDLHNDRPSTAQFREKLPWFLDALPSADCSKGGHGAYTXTVEVTGYESGIIKASSLRTYHTPLNKQIDYVNSMRAARKFASRVSHSLKMEIFPYSVSYM

SEQ ID NO: 117162 - protein, 61 aa, Gossypium hirsutum
  unsure (1)..(61): unsure at all Xaa locations
  Clone ID: AI731424.1.pep
TIVVPQIFVSXGAGPWDALFGGGNVPAFILGSLCALAAGVIATFRLPDLSSSFKSSGFHFG

SEQ ID NO: 117163 - protein, 168 aa, Gossypium hirsutum
  Clone ID: AI731417.1.pep
KTEQNATANSRGKQVVKQAKDSSQTGEAPKENYIHVRARRGQATNSHSLAERVRREKISERMKLLQELVPGCNKITGKAVMLDEIINYVQSLQQQVEFLSMKLATVNPELNIDLERILSKEILHSRGGNAAVVGFNPGINLSHPFSSGIFPGTISGIPNTNPQFPPKG

SEQ ID NO: 117164 - protein, 155 aa, Gossypium hirsutum
  unsure (1)..(155): unsure at all Xaa locations
  Clone ID: AI731354.1.pep
MKGSFSRRLKILSFVLSWMFLLXLVFPATAQDDLKCLEGVKNSLENPDGRLSSWTFNNNSVGFVCKFVGVQCWNEQKNRLLGLELRDMKLSGELPQSLKYCRSLQTLNLSANKLSGTIPPQICSWLPYLLTLDLSXNDLHGSVPPELSNCAYLNN

SEQ ID NO: 117165 - protein, 98 aa, Gossypium hirsutum
  unsure (1)..(98): unsure at all Xaa locations
  Clone ID: AI731342.1.pep
MGSLDEGHLCVEIENGMKLDVSEKDPETIPIEDAVKVLLQGLGEDFNIDGLNKTPLLVAKALPKGTRGYXQKVXDIVQGALFPEVGLHDGVGHAGRVC

SEQ ID NO: 117166 - protein, 64 aa, Gossypium hirsutum
  Clone ID: AI731341.1.pep
PIGFLPTGFLLIQGISRIHVFLLMGFLYFIFYAIDFFLSFFEVLFKICRNVLFQPFLGFLYGFN

SEQ ID NO: 117167 - protein, 119 aa, Gossypium hirsutum
  Clone ID: AI731322.1.pep
ESGELYTWGSNENGCLGIGSTDVFHAPERIQDPFLKSPVSKVSCGWKHTAAISDGKVFTWGWGGSHGTFSVDGHSSGGQLGHGSDVDYTKPTMVHVGENVKALEISCGFNHTGAMFGYM

SEQ ID NO: 117168 - protein, 165 aa, Gossypium hirsutum
  unsure (1)..(165): unsure at all Xaa locations
  Clone ID: AI731302.1.pep
RFEEVAELINVCWLEIRGKIAISMLSPMTRYKACLVFKATARAYGYDFQPAEVSVSIAGTEGCKKTVYLDAARGLRQRYQIEPRRIGLFSRSRFLGLQAPVPLAPAGGDDXNPXTKGDGWLEIELGEFFNDGSIDGELXMSVMEVDGGHWKGGLIVXGIEIRPCL

SEQ ID NO: 117169 - protein, 214 aa, Gossypium hirsutum
  unsure (1)..(214): unsure at all Xaa locations
  Clone ID: AI731290.1.pep
KKKEERATKSTRTTKGKRRRRKKREEHEEKKRREGTRRRRTEKGRGRRQKARAREKRRKTRAAKETKPRKTREDRRNGEAKQEQTGRRQRHGQKNTTEGKKTEQGEREGERREKTREKKKKRGERREKERTKSREREKKGRRREATRTRGSEGGEEAEARERATXRHRQGERRSETDQRSVAPPTTLPPHYWVKLLMSRAKSISAMIRDSTRYK

SEQ ID NO: 117170 - protein, 197 aa, Gossypium hirsutum
  unsure (1)..(197): unsure at all Xaa locations
  Clone ID: AI731289.1.pep
MAAATALNLCRPWQSPPTHNQFITKPRPSIRPPITCYTANKSKREYTSVMIVPTGVGASIGGFAGDALPVARVLSSVVDCLISHPNVLNAAMLYWPMPNVMYVEGYALDRFAQGLWALQPVHQNKVGLVLDAGIKXHLRVRHLQVADATRAXLGLPVVEYAVTDTPLKVEKWVNPTTGQSTGRIKXPDSLLRAVENF

SEQ ID NO: 117171 - protein, 93 aa, Gossypium hirsutum
  Clone ID: AI731278.1.pep
VCEPHNIGTAYSDHTVKIWNVDGFTLEKTLIGHQRWVWDCVFSVDGAYLITASFDTTAKLWSMTSGEEIKTYQGHHKATFCCAKHDGADPFPF

SEQ ID NO: 117172 - protein, 154 aa, Gossypium hirsutum
  unsure (1)..(154): unsure at all Xaa locations
  Clone ID: AI731272.1.pep
PQFLFVEGGIQMFVCQVGVAVLXAVTTGVSGTKEISKGYAILVLFLMCIYAAGFGWSWGPLSWLIPSEIFPIKIRSTGQSISVAVNFATTFVLSQTFLTMLCHFKYGTFLFYAAWIASMTIFVALFLPETKGIPLDSMNSVWEKHWYWRRFVSG

SEQ ID NO: 117173 - protein, 129 aa, Gossypium hirsutum
  unsure (1)..(129): unsure at all Xaa locations
  Clone ID: AI731242.1.pep
MPATFEESTTLEFIRQHLLGDFATVDAFINTLDFGLSHLQPQSHQLPEIFTHGVEPAPITKEPFCEEKRHYKSVRRRPWGKFAAEIRDPNRKGNSVWLRNYDNDVHAAXAYECSAFKMKGSKTILNFPL

SEQ ID NO: 117174 - protein, 195 aa, Gossypium hirsutum
  unsure (1)..(195): unsure at all Xaa locations
  Clone ID: AI731233.1.pep
ERYNVRTIRKTLAEIDSEGQLLPDGTFLVGGQAVAVVYFRAGYAPTDYPSESEWRARLLMEQSSAIKCPSISYHLAGTKKIQQELAKPNVLEKFLESKEDIAKLRKCFAGLWSLVDSNITKKAIEKPELFVMKPQRERGGNXXYGDDVKETLLRLQKEVSEENAAYILMQKIFPXVSPTFLIRDSICHKDHAISE

SEQ ID NO: 117175 - protein, 172 aa, Gossypium hirsutum
  unsure (1)..(172): unsure at all Xaa locations
  Clone ID: AI731228.1.pep
MQDPRNLNPNPDPAFPSFTQNMPSFSNPAQYRGSYHRRAQSEVQFRIPDDLDLVSDPFEGVGSEDDMLCSYMDIEMPGESAKGVEAAAGSWSQNPKGEEVSGGSGIGDKYNGGGKGRHRYXNSVDGCSIMESIEAKKAMAPDKLAELWTIDPKRAKRIIANRRSATRSKEKK

SEQ ID NO: 117176 - protein, 91 aa, Gossypium hirsutum
  unsure (1)..(91): unsure at all Xaa locations
  Clone ID: AI731217.1.pep
QLHASYAPASWRHAHALVHTQTPPRTCKYRRDNSSRNKQKIVFLIFISFLFSFLSGYKANNSIFVMVTDKGNKNKYKKENXXXIXSKESDF

SEQ ID NO: 117177 - protein, 174 aa, Gossypium hirsutum
  unsure (1)..(174): unsure at all Xaa locations
  Clone ID: AI731194.1.pep
MRNTLWRVLSSLSGHFAHLTHENQNRVVSVHRVYPHPWHVPDTLSSQIPGAMTSGSLSSVVISCPXNLPEADWCIYGSPSTRGISXTWXVCCTDSVGGLCKSHPLTSTTTRIIYHLGSLGSAFDFTPSTAFVLLLLTGMIIVPMRYIYSAAIFDNELVXGRNPDGAKTYPGERP

SEQ ID NO: 117178 - protein, 97 aa, Gossypium hirsutum
  Clone ID: AI731178.1.pep
HKTSSIYIMTLQGQVVKSFSSGKKEGGDFVAACVSPKGEWIYCVGEDRNIYCFSYQTGKLEHLMTVHEKDVIGITHHPHRNLVATYAEDCTMKLWKS

SEQ ID NO: 117179 - protein, 187 aa, Gossypium hirsutum
  unsure (1)..(187): unsure at all Xaa locations
  Clone ID: AI731162.1.pep
ATFDPLIGRKVWTRWPEDNHFYEAVITDYNRSEGRHALVYDINTANETWEWVDLKEISPDDIRWDGEDPXISYRGGHGFHGAKKSFSHGAPAPGTGRGRGSXKGLYXKKSLPRQNGIVKKLSDDIELLNTEALLKEVEKVFDASHPDPHELEKXKKTLKEHEQALIDAIARLADASDGESGNQYMPT

SEQ ID NO: 117180 - protein, 190 aa, Gossypium hirsutum
  Clone ID: AI731150.1.pep
QVACGYNLTVALTTSGRVYTMGSSAYGQLGSATADGKVPTRVEGKIADNFVEKIACGSYHIAILTSKTKVYTWGKGLNGQLGHGDINDRNTPTLVEFLKDKLVKSVVCGSNFTAIISLHKLVSAADHSMCSGCRNPFGFRRKRHNCYNCGLIFCKACSTKKSLKTSMAPTTNKPYKVCDECFVKLRKAAK

SEQ ID NO: 117181 - protein, 98 aa, Gossypium hirsutum
  unsure (1)..(98): unsure at all Xaa locations
  Clone ID: AI731149.1.pep
LLSPYHGLYPPGQYGRHSELLLEKGYVYYKLNSXGCMVPHTILXDVEPGTXDDCXSSPVPTFYQPYSFVLRHSCAAYDCAPGCLIERVELLYALLHVA

SEQ ID NO: 117182 - protein, 76 aa, Gossypium hirsutum
  Clone ID: AI731139.1.pep
AVKMSAFSSVKELCSRLQSNLNDFQGTSLHARTTAFIHELFSSVSPKLVESISTIKISQVYNLCFSRFASLRVLFS

SEQ ID NO: 117183 - protein, 123 aa, Gossypium hirsutum
  Clone ID: AI731103.1.pep
FALMMFQMEGGCPVDYNTITDFFFQRKLIREGTAFLLEVLKPNLPEHGFLQNKVLEINLVNFPNVGDAILANGMFSQYDRPCIAKICEKGGFYVRVLQHYNELPDIKSVIVKKNGIEPKVRVV

SEQ ID NO: 117184 - protein, 194 aa, Gossypium hirsutum
  Clone ID: AI731100.1.pep
SGSVDDNSKLKVAIVGFGNFGQFLAKTLARQGRSVLAYSRTDYRDAAQKLGVSFFSDANDLCEEHPEVILLCTSILSTEKVLKSMPFQRLKRSTLFVDVLSVKEFPRNLFLQHLPPEFDILCTHPMFGPESGKNGWNELPFVFDKVRIGNDERRVARCNSFLDIFAREGCRMVEMTCAEHDWHAAGSQFITHTM

SEQ ID NO: 117185 - protein, 128 aa, Gossypium hirsutum
  unsure (1)..(128): unsure at all Xaa locations
  Clone ID: AI731097.1.pep
MIERARIKLSPWQQAAVAVGSAVGALLDPRRADLIAALGETTGKPAFERVLERMRRSPEGKTXLLERPRVISANVGHAWDLPKNTFGAAYARFLGSXNFSPDDRPPVRFMDTDELAYVAMRAREVHDF

SEQ ID NO: 117186 - protein, 175 aa, Gossypium hirsutum
  Clone ID: AI731082.1.pep
MPGIPLVARETSSYSRSTDQMCQEDSGLNLYAEEEIAAEESLSVYCKPVELYNILQRRAIRNPLFLQRCLRYKLQAKHKKRIQMTVSVPGIVNEGVLTQTVFPLYILLARLVSDVAVAEYSAVYRFRRACILTSFTGIDDSNQAQVNFILPEINKLAMEAKSGSLAILLVSFANG

SEQ ID NO: 117187 - protein, 198 aa, Gossypium hirsutum
  Clone ID: AI731073.1.pep
RLNEPETFSAEDVAGGDDEDGGSEDLDLQQNRGSVVASPRIASSSSDSLSLGIREPVYEVLEVKSNGVVSTSKINRRQLLKSSGLRPRDIRSVDPSLFLTNSAPSILVREHAILLNLGSLRAIAMRDCVLIFEYNRKGGQAFMDTLLPRLNNINGGPCMPFELEVVEAALLSRTQRLEQRLMDLEPRVQALLEELPKN

SEQ ID NO: 117188 - protein, 163 aa, Gossypium hirsutum
  Clone ID: AI731069.1.pep
ILISEDLGFSDMEKVVAVIMVGGPTKGTRFRPLSFNTPKPLFPLAGQPMVHHPISACKRIPNLAQIFLIGFYEEREFTLYVSSISNELKIPVRYLKEDKPHGSAGGLYYFRNIIMEDNPSHIFLLNCDVCCSFPLTDMLEAHKRYSGMGTVLVIKVSAESASH

SEQ ID NO: 117189 - protein, 174 aa, Gossypium hirsutum
  unsure (1)..(174): unsure at all Xaa locations
  Clone ID: AI731067.1.pep
SHGNSLVPKVSIKGFHSVTPMRITEPRQTRRVLSRDLVGPEMFQRCFNMVQCYTKGEDSGWVXAGWIKESLGRALLEQPMISGRLQKRDRNDGELEIVSNDSGIRIIEATIQTTLSEFLDLKQREEAEAQLVFWNDIDEHNPQFSPLFYVQVTNFQCGGYSIGISCSILLVDFF

SEQ ID NO: 117190 - protein, 150 aa, Gossypium hirsutum
  Clone ID: AI731050.1.pep
MENPGNFRLVFGISFLYCLLNLSLGFNPVDNYLIDCGSFKNRSIGVREFVADNTNTSSHRLSTPEHIFANSSSNSISLYNDSTLYQTARIFNGPSHYSFSIKEQGRHWIRLHFFPFLFQKYDMSNAKFSVSAQNFSLTRDTQSGNVSVVN

SEQ ID NO: 117191 - protein, 213 aa, Gossypium hirsutum
  Clone ID: AI731034.1.pep
KKATVRINIYKQHRQTIQYIQPHEHEKLSQVELLVVDEAAAIPLPVVKSLLGPYLVFLSSTVNGYEGTGRSLSLKLLQQLEEQSQLSKGVEGSLSGRVFKKIELSESIRYASADPIECWLNALLCLNVTNSVASISRLPPPSECDLYYVDRDTLFSYHKDSELFLQRMMALYVSSHYKNSPNDLQLMADAPAHHLFVLLGPVDESKNQLPDIL

SEQ ID NO: 117192 - protein, 76 aa, Gossypium hirsutum
  Clone ID: AI731022.1.pep
MVVEAFAGKNTVKVSYNSKGKGGFKAARLAFRAESTRTRIMFYSTFYAMKSDNSGSLCGPVLDDVKLLSVRKLHHL

SEQ ID NO: 117193 - protein, 221 aa, Gossypium hirsutum
  unsure (1)..(221): unsure at all Xaa locations
  Clone ID: AI731005.1.pep
HTADQIREMEALFKESPHPDEKQRQQLSKQLGLAPRQVKFWFQNRRTQIKAIQERHENSLLKQELDKLRDENKAMRETINKACCLNCGMATTAKDGSITAEEQQLRIENAKLKAEVEKLRTVIGKYPPGASTTGSCSSGNDQENRSSLDFYTGIFGLEKSRIMEIVNQAMEELQKMATAGEPLWVRXVETGSEILNYNEYVQEFXVESSSNGRPKRSIEAS

SEQ ID NO: 117194 - protein, 216 aa, Gossypium hirsutum
  unsure (1)..(216): unsure at all Xaa locations
  Clone ID: AI731002.1.pep
PACIQALDTRASLLETIRCLPDCLHDLEHLKLLYNSILRDRKLPGPVWKRHNVRYREIPGKLCALTTKIQQLKQRVASGETANVDYYALIGLRRGCSRSELERAHLLLCLRHKPDKATNFIDSCEFADERDVDSVKDRAKMSALLLYRLLQKGYSXVMSTIMDEDTAEKRRKKATVQVPQTQNSSSKLDPESTLAYSVKSSNASDCDGKANIEETT

SEQ ID NO: 117195 - protein, 91 aa, Gossypium hirsutum
  unsure (1)..(91): unsure at all Xaa locations
  Clone ID: AI730997.1.pep
CYSWQVSVPKGSLCNLKAKLDGGLPPDAVYDILTDPDSKRIFKNIKEVISKKVLVDEGQXXVVEVDQAAFWRFLWWSGTISVRVLVDQNRE

SEQ ID NO: 117196 - protein, 206 aa, Gossypium hirsutum
  unsure (1)..(206): unsure at all Xaa locations
  Clone ID: AI730961.1.pep
ADISIRYLCDLGKNASFHANVAGRTECNVFDITRALKDLGDSHGFPXASEVGNCLVGSGTVREIVQFVDTKEEIPFAQPVPKFPVVRNRKLIPSFEHMKETPSGKHIPSWLPAFPDPHTYNHTPMWNERGSDPCADKIEQARQRRKAEKALLRLQQKLVCNGSTETSSSTVLDAKTENIQEPRRNPFLAVLQPGEKDVSKVLPKLS

SEQ ID NO: 117197 - protein, 149 aa, Gossypium hirsutum
  unsure (1)..(149): unsure at all Xaa locations
  Clone ID: AI730921.1.pep
MRSGTGIGTVRRRLHHSDVGGIRNENYETSGLDGLDEPLLGKRDYDDKHSEGKVMEEIWDDERKIEQLHWTLLFSNLIAQWAQWIANLVFGSGSFIVRHLPLLSNTXNRSYPIFIVPTLSPLXEDRLRYLQQKLGVPFDGSRVDHQDAX

SEQ ID NO: 117198 - protein, 203 aa, Gossypium hirsutum
  unsure (1)..(203): unsure at all Xaa locations
  Clone ID: AI730845.1.pep
MSAHLSKTDSEVSSLSQSSPARSDRRQVYYVQSPSRDSHDGEKTTNSFHSTPVLSPMGSPPHSHSNSSLGPHSSRESSSTRLSGSMKPQRKHDGSRKGRKPWKEFDAIEEEGLLDGDGAHXDFHRRRCYFLAFVVGFFVLFTTFSLILWGASRPQKPKITMKSISFNEFRVHAGTDSSGVSTEMVTMNCTVKLTFRNTATFFG

SEQ ID NO: 117199 - protein, 208 aa, Gossypium hirsutum
  unsure (1)..(208): unsure at all Xaa locations
  Clone ID: AI730831.1.pep
KKVVPRVCIIGGKAAPGYEIAKKIIKLCHVVAERINNDNDIGDLLKLVFIPDYNVSVAEMVIPGADLSQHLSTAGHEASGTGSMKFLMNGCLLLATADGSTIEMVEEIGQDNMFLFGAKAHEVVALRKKGPTLKVPLQFSRVVRMIRDGHFGFEDYFKSLCDKIEGTSDYFLLGADFMSYLKAQAAADKAFVDEERWXKMSILSAAGS

SEQ ID NO: 117200 - protein, 208 aa, Gossypium hirsutum
  Clone ID: AI730830.1.pep
TTSLESRIRQATKEALREIDAVGVQCTCRRPVDGGCRNCLQRELSIRLQSVDFDCYICKSKWRSSPEIPSGEHTYLEVVDKSKAKKREVRVVIELNFRAEFEMATASKDYNKLIAVLPELLVGKAERFKALTKILCLAAKKCMKEKKMHLAPWRKYKYMQAKWLGTYERRSPAPLAVGYSDRQPKPKASMLTSDLRENLPALHYTAVE

SEQ ID NO: 117201 - protein, 140 aa, Gossypium hirsutum
  Clone ID: AI730760.1.pep
MDESSYWNLPSSHLLGSVPAVVNEESEASYGRRGGGVRGYQTLGPPTEGFEQQSQNNWKGVFSISSYTQYFDVDTDVVVNRLISSFYPAGGDFFNKIGANPDLYGLIWITTTLVFMLAAFGNCATYLIQKRTDRTTTWSF

SEQ ID NO: 117202 - protein, 208 aa, Gossypium hirsutum
  unsure (1)..(208): unsure at all Xaa locations
  Clone ID: AI730749.1.pep
FSTAKHGIVFVLFLLLFLSPPPSTAQPTDPNNDRYPYARFTPSMAIIVVVLISALFFMGFFSIYLRNCSEANANGSVVRPFNGETGRSRRGMRGLEPSVIETFPTMVYSEVKVHKIGKGALECAVCLNEFEDEETLRLIPKCDHVFHPDCIDAWLASHTTCPXCRANLAPQPGDPMSQPAELDNTTTELDLEAQNHNNDSELEEDKIP

SEQ ID NO: 117203 - protein, 108 aa, Gossypium hirsutum
  unsure (1)..(108): unsure at all Xaa locations
  Clone ID: AI730730.1.pep
MSADTMMNVPNGNGNGNAQPDPQRTYQVVVAATKDMGIGKDGKLPWNLPSDLKFFKDITLTTSDSGKKNAVIMGMKTWESIXLKNRPLPGRLNVVLTRSGSFDIATAD

SEQ ID NO: 117204 - protein, 156 aa, Gossypium hirsutum
  unsure (1)..(156): unsure at all Xaa locations
  Clone ID: AI730727.1.pep
MAPVSESESGGSDSTITIDFSNPPYLHPSDTPWIVLVSHQLTGTDNYCVWSRSMSIALLAKNKLGFIDGSCKRDSLSPDLKSQWDRCNAFVLSWIINTVSKELSAGIVFASSAALVWKDLQERYDKVDGSRVYYLHRSISTHTQGTSSVATYXTKL

SEQ ID NO: 117205 - protein, 135 aa, Gossypium hirsutum
  unsure (1)..(135): unsure at all Xaa locations
  Clone ID: AI730721.1.pep
IAASSAQYLLPSILAQHTTPYNLVLTDADXQRVLECNVDQLQDSIVNHLQLLLLQLMTLXPAFNKKLWFAPHLHLPDGVMFKXPTLVSNRPSKLSSSMVLVSDPSWISSALYKTXLTTAKILVRTRTYCLDINSS

SEQ ID NO: 117206 - protein, 173 aa, Gossypium hirsutum
  Clone ID: AI730715.1.pep
MPNQSDDHNSDPPPPPFDPSKPSIPISYPINSLEDLDSASYFTSFHYPFNKSTVPLHPPNSALPPRPRLLVCHDMQGGYVDDKWIQGGHNSGAYAIWHWYLIDVFVYFSHNLVTLPPPCWNNTAHRHGVKVLGTFITKWDESAAICKKLLSTKESAHKYAERLAELAVAFRLD

SEQ ID NO: 117207 - protein, 150 aa, Gossypium hirsutum
  unsure (1)..(150): unsure at all Xaa locations
  Clone ID: AI730712.1.pep
VPSQYIQPPKSRPGSVTEYITDXAANIFLPLIYPFXNESVIPGIRKACQHWGALHIIYHGVPTKLLDYLRIACFSSFHDFTMEDKIQYACNPNFAASEGYRNRLLLSSEHQTVLDRMDYLDHHTLPLSRRNPSARPHFPPDIRELIGPXR

SEQ ID NO: 117208 - protein, 156 aa, Gossypium hirsutum
  unsure (1)..(156): unsure at all Xaa locations
  Clone ID: AI730668.1.pep
TPYYVYIVVGYPRGGHYLRHKXGAXNXYXGERGRPAGGGRRRGGRTEGEGGGFSVISVGVGLWVGGILSLFLDYSFEWGVCWWRVCWLCFFLAGGIGSCVVCVVRGFGLFLFRLWVRIIMYRDLIGLFLSLLIFLCGFVRFGGCIIWCATCFVGFG

SEQ ID NO: 117209 - protein, 186 aa, Gossypium hirsutum
  unsure (1)..(186): unsure at all Xaa locations
  Clone ID: AI730663.1.pep
MAMNMELAIPSLPLLSLSTFLLLHPSLIPSSPVQETEIVVHDVLRLSXASLMNLWYLSCGTGRSLDECERXDPHWDTNYRNRXYCVIGFRSKALRVKRCSMDVVTDSCDHEIVNPXPXSLSQAVVSEKPLWINYAREWTXQLDPELRLNPFKNLKRLGARVHVARGRXLTVHYVSNSIDRGLSIRD

SEQ ID NO: 117210 - protein, 156 aa, Gossypium hirsutum
  unsure (1)..(156): unsure at all Xaa locations
  Clone ID: AI730650.1.pep
FHKVLRKETYNVVLEMQIYTSLVATCVSTAGMFGSGEWKGLQDEMKGFKSGRVSYVLTLVWTAVSWQVCTVGVVXLIFALSSLFSNVISTLSLAITPLAALLVFHDEMNMVKVIAMLLALCGFCSYIYQNYLNDTKARKSESQSHTDDVIRESHHV

SEQ ID NO: 117211 - protein, 167 aa, Gossypium hirsutum
  Clone ID: AI730628.1.pep
NSVPSPIQIRDKLMHASAVIDGKVYAMADRNGVCYEVKSGNWETVDSDLDNGWRGRACVIDGVLFCYDYLGNIRGYDVKEGTWNELKGLEKGLPRFLCGATMANLGGKLMVVWESKNGGGKETEIRCAEIEVKTNEAGELWGNIEWSDVVLLVPREASIVHCLAVAL

SEQ ID NO: 117212 - protein, 117 aa, Gossypium hirsutum
  unsure (1)..(117): unsure at all Xaa locations
  Clone ID: AI730610.1.pep
QIFLLSHATNINNHLGIFGNTPLATIYVXGGLPCDSPSXAIRENVEKYGDISEPVIISDKITRPSLGFGFSTSSDADDAVKTCYDANPITLXRPDLCNLSSLRSLLAKYSSSAPPQL

SEQ ID NO: 117213 - protein, 191 aa, Gossypium hirsutum
  Clone ID: AI730476.1.pep
MADINHHKHGTLSENSADSGDKPDKNSEDVVVQARHKRRGAMISSYASAQDLRSPDAENKKKDGSSPKGVIEASLEGLESDIASPEDSPKAEVRCTHAGALSNWRKLFKLWKRKSEKPFSTFPQLVVPRLSRKNNSSKQENPMLRKLYNFKSSLENFSLSQLRAATDNFNRENIIGRGGYAEFYKGRLKDG

SEQ ID NO: 117214 - protein, 203 aa, Gossypium hirsutum
  unsure (1)..(203): unsure at all Xaa locations
  Clone ID: AI730444.1.pep
DNLDNSSDVALKRVKELAGEFGRNLSFYQVDLRDRAAIQKVFAQTKFDAVIHFAGLKAVGESVSKPLLYHDNNIVGTITLLEVMAAHGCKNLVFSSSATVYGWPKKVPCTEEFPLSAVNPYGRTKLFIEEICRDLRNSDSQWKIILLRYFNPVGAHPSGHIGEDPRGTPNNLMPFVQQVAVGMRQALTVFGXDYSTKDGIGVR

SEQ ID NO: 117215 - protein, 204 aa, Gossypium hirsutum
  unsure (1)..(204): unsure at all Xaa locations
  Clone ID: AI730425.1.pep
AFKDISGQYRQGLIGTDRYLDYVHQHGLSHLVLELARLLPDVQKQKELIDTYHASLQSNGLQENGGGAHGSVLWKEKDASKKRKGKGKSVDTAGSNSKDVLADSILXTVRQLQSSYKPTEEITEVLSKDGYRPSTGKAKVMVEEXQVLLNSSNQPSIKIGGQNESLPLKTGSWDGGLLVXQQKKTSKFHPFXLGDGSMASLMDL

SEQ ID NO: 117216 - protein, 194 aa, Gossypium hirsutum
  unsure (1)..(194): unsure at all Xaa locations
  Clone ID: AI730418.1.pep
VKRSTKDRHTKVDGRGRRIRMPXTCAARVFQLTTELCHKSDGETIEWLLQQAEPAIIAATGTGTIPANFSTLNISLRSSGSTLSAPPSKSAPHSFHGALTLASHHHHHHPYEEGFAHSALLGFQQQHLLTADQITEALPGGGSGDGGELIENYRTRFTEDLDDDQQQGETGSGGGYGSPIHAFNGETLLSKPQL

SEQ ID NO: 117217 - protein, 66 aa, Gossypium hirsutum
  unsure (1)..(66): unsure at all Xaa locations
  Clone ID: AI730557.1.pep
MAILYALVARGSVVLAEFTAASTNASAIARQILEKTSGDNDINVSYXQDRYIFHVKRTDGLTVLCM

SEQ ID NO: 117218 - protein, 69 aa, Gossypium hirsutum
  Clone ID: AI730554.1.pep
TTYNGGPRYLPPCLSEPSNMELKSLARIHSSKTSSRPLIKSFPQFTPFLKLRAHINCRTKKGSLVQNSI

SEQ ID NO: 117219 - protein, 214 aa, Gossypium hirsutum
  unsure (1)..(214): unsure at all Xaa locations
  Clone ID: AI730537.1.pep
TLDLSGNNLTGTIPTELTTLPKLVRLDVSNNRLYGKVPPFRQNVAVITAGNPDIGKEMASPPAGKSPGGSPAGGGGSSGSSSGNGEKKSNTGTVVGSAIGAVGGLSLLVLGILLYAKKGKRTSKVQSPTTVVIHPHHSDDQDGVKITVAGSSVTGGSETFSHTSSGPSDVHLVEAGNMVISIQVLKDVTNNFSEENVLXRGXXGTXYKGELHDG

SEQ ID NO: 117220 - protein, 215 aa, Gossypium hirsutum
  unsure (1)..(215): unsure at all Xaa locations
  Clone ID: AI730535.1.pep
LVPVATNNFSVKLGHGGFGSVYRGILADGTQIAVKKLESIGQGKKEFRAEVGIIGSIHHVHLVRLKGFCAEGSYRLLAYEYMANGSLNKRIFKRNREEEPLLDWRTRFNIAVGTAKGLAYLHEDCDAKIVHCDIKPENVLLDDHFLXKVSDFGLAKLMTREQSHVFTTLRGTXRYLAPEWITNYAISEKSDVYSYGMLLLEIIGGRKNFDPGESS

SEQ ID NO: 117221 - protein, 216 aa, Gossypium hirsutum
  unsure (1)..(216): unsure at all Xaa locations
  Clone ID: AI730525.1.pep
PEKHMMILLSGASGYLGGRLCHALVNRGYAVRTLVRRTSDLSGLPSSSPTDGASLELAXGDITDYPSLLDACSDCDIIFHTAALVEPWLPDHSRFFSVNVGGLKNLLQAAKETKTINKIIYXSSFFAFGPTDGYIADENHIHLEKAFCTEYDKSKAAADQVALHPIADGMPIVPVYPPVIYGPGQLTTSNVVAALLIERFNLRIPGFIGLGNDNFL

SEQ ID NO: 117222 - protein, 152 aa, Gossypium hirsutum
  unsure (1)..(152): unsure at all Xaa locations
  Clone ID: AI730524.1.pep
RYIVSVNVDTRFIPSCLVNHPLLHGFAVISSVRDPVDQTATRLLRALDGDYQGLKLFTSDTLYKGSFQTCVVSRDSVSLSTSPMPHDXYIPRLKVPSCVIGRRMFTIMCCESSVRPIVCMSSHAADSYHEKPLPPHVFLDESPLTIQITIPI

SEQ ID NO: 117223 - protein, 188 aa, Gossypium hirsutum
  unsure (1)..(188): unsure at all Xaa locations
  Clone ID: AI730523.1.pep
KIADGEDIHPPVCDTGAGIVKAGSAGDYPPKALCPITVRRPPHTGVIVRMGTKDSYVSHKGQSNPRMVDLKYPLEHVIVPTXDDTESMXPHTSSYEVLVAPEKHPILLTRSPLPPXADRVTMRQFSCYTFNXAAKYVAMHAVLPLYAIGLTPGIVLHSANRVXHAFALCXGYALPHAFSRSYLAGRLL

SEQ ID NO: 117224 - protein, 220 aa, Gossypium hirsutum
  unsure (1)..(220): unsure at all Xaa locations
  Clone ID: AI730522.1.pep
EDLDDVKPRDSVLYGLACIDNWANDRHFCASEIRQNIIIVVAGRDRTVGSVLRCLGELSHNGLEPVPPVTLTPLGRCNDLSTNLGCGGTSPSPSHSAFKKTXHRRLLSCPLSTSDSMPLVLRVTCRXISHTPQXIMDAKECSPHATLGMYRQLPHRVGLSDGVFYCGSAFGMDARFAYGCPRLRHEEPRXGRGVLCRNKMIXSGYDCRPGGYLSPCAADP

SEQ ID NO: 117225 - protein, 196 aa, Gossypium hirsutum
  unsure (1)..(196): unsure at all Xaa locations
  Clone ID: AI730521.1.pep
LTPPYLISSTILFPPLFISVLSIPRFRQFISFHFFLAAYLLLLHDGNFTVSIIGFNSCIYPSSSNCLFMTLSWFPLMRFSCTRNSPDSTRLRSSSSLIHHLRIATFPSSFRPKHLNLDSDYAIHYSLHRPFGDSDYTLDVCFYPLLKLSNHCGQILSFLVFPTISGSDVDSXSSLLCARLSIAYGXNSNLVFSVFL

SEQ ID NO: 117226 - protein, 152 aa, Gossypium hirsutum
  unsure (1)..(152): unsure at all Xaa locations
  Clone ID: AI730520.1.pep
MRKMIICWRAKMVAHSNHPKSDIHLGENAHMPWGLNLKRAENDHVPPAFGAVNGYRPRPVNPDADDVLVGQAVXGVIEAAFDAGYLLAVTVGDSDTTLRGVVFKPGHYVPXSXENDVAPNLQMIKRNIPFPREKGAHPLIGTALAYLVPRAP

SEQ ID NO: 117227 - protein, 186 aa, Gossypium hirsutum
  unsure (1)..(186): unsure at all Xaa locations
  Clone ID: AI730490.1.pep
MATSLCTHVPALFLLLLLLVSAPCNAGILRTCKFDAIYQLGDSISDTGNLIREHPFSPFARLPYGGTFFKHATGRCSNGLLIIDFLALSAGIPFLXPYLNSNGLFSRGRGVNIAVAGSTALPVETLADKGVVAPVTNSSLXRQLDWMFTHFNGICHDDDDCXEKLXTALFIVGEIGRNDYNYALFQ

SEQ ID NO: 117228 - protein, 170 aa, Gossypium hirsutum
  unsure (1)..(170): unsure at all Xaa locations
  Clone ID: AI730398.1.pep
FAEAMSLSSSAFAISAPSFSFKARRPKTPLPSSFQNPLRCNSTPSVPPLSRKLHPVKATILQEDEEDVFVEKSFRTTSFPGNGIEEVEESRGNSSSSSLEKWVIKVEQSVNIFLTDSVIKILDTLYRDRDYARFFVLETIARVPYFAFISVLHMYESFGWWRRADYLXVH

SEQ ID NO: 117229 - protein, 200 aa, Gossypium hirsutum
  unsure (1)..(200): unsure at all Xaa locations
  Clone ID: AI730388.1.pep
DNNFSDESKLTWWLQRLVGQKKSLTVNWPFPFAENKLFVLTLSAGMEGYHVNVDGRHITSFPYRTGYTLKDATGLTLNGDIDVHAVFASSLPTSHPIDATQKNLEMSNQWKAPPLPEQPVDLFIGILSAGNHFAERMAIRKSWMQHNLVKSSIVHVRFFVAVHPRKEVNVELXNETEFFGDIVIVPYMDNYELVVLKTVS

SEQ ID NO: 117230 - protein, 188 aa, Gossypium hirsutum
  unsure (1)..(188): unsure at all Xaa locations
  Clone ID: AI730380.1.pep
MKTVTGKILSSTPVSVSKAAKIIANFSATDNGASQAIRAYLRRASASFSELKQLHKELRKPSRSDHKHKKSKSETTVDGARESSLEPSEFNSAREDVEVSQEAGHGYRDGERKKQKSKKKKAKGENIDVGGKIVIEDGESKKGKENXESNFGEDEDXTXXNHKKEKSGRKVETLEENGVNLEKGDMME

SEQ ID NO: 117231 - protein, 140 aa, Gossypium hirsutum
  unsure (1)..(140): unsure at all Xaa locations
  Clone ID: AI730355.1.pep
PTPQRRERQLTEQTQETEGSARGRREDKERNTEEHRENPVTTSRRRGEPNRRDKERLDRQRTHTTSKDMSSREQEKEKRPRRRRSEENTTIRKRRHXDRKKERQKPRSTEAGESQKDPGVDSFGKKKRKKNNIRKKNGRR

SEQ ID NO: 117232 - protein, 143 aa, Gossypium hirsutum
  Clone ID: AI730337.1.pep
MAMAFKMATTGMWVADECKNSFMEMKWKKVHRYIVFKIDEKSKLVTVDKVGGAGESYDDFTASLPTDDCRYAVFDFDFVTVDNCRKSKIFFIAWSPTASRIRAKMLYATSKDGLRRVLDGIHYEVQATDPTEMGMDVIKHKAY

SEQ ID NO: 117233 - protein, 123 aa, Gossypium hirsutum
  unsure (1)..(123): unsure at all Xaa locations
  Clone ID: AI730325.1.pep
LEPWYLLNYGHIVCSCPSIGLKVYTVESTIIGISVWDVGGRVFILPLWMPPYHTSXGLIVVFDDNVFHRLVDAKDDLRLEFLEDQLRHALSLVFVLLPDLPFPINAAPVNALLRHIALLYRHY

SEQ ID NO: 117234 - protein, 164 aa, Gossypium hirsutum
  Clone ID: AI730238.1.pep
MWGGPAEPADSYYAVRPECTDVPRTRFKIKPGKTLSARKWQAAFSLDGHLDIGKTLHRIQRGGIHPSIRGEVWEFLLACYDPESTFDERDQIRQHKRVQYARWKNECREIFPVIGSGRYITAPVITEDGQPIQDPFVLSEINPGMNGNNTEMMNELTPRGPLDK

SEQ ID NO: 117235 - protein, 117 aa, Gossypium hirsutum
  Clone ID: AI730215.1.pep
VVTGGRALKSAENFKMIEKLAEKLGAAVGATRAAVDAGFVPNDLQVGQTGKIVAPELYMAFGVSGAIQHLAGMKDSKIIVAVNKDSDAPIFQVADYGLVGDLFEVIPELLEKLPEKK

SEQ ID NO: 117236 - protein, 50 aa, Gossypium hirsutum
  Clone ID: AI730201.1.pep
EAAFFGATVPPKLEEPFILGTSIMSAMHQDTSPDLKVVASNLKDILEVYF

SEQ ID NO: 117237 - protein, 155 aa, Gossypium hirsutum
  Clone ID: AI730181.1.pep
NGPKGPTPNSEFEHSSIPATIKKIFNLSSNFLTHRDAWAGTFEDVVSHLTSPRTDCPETLPDVVPLRATEAKEDAALSEFQSEVVQLAAVLNGDHFLSSFPDEMSKKMTVKEAHEYTKGAISRFIRASKEALKLGAAESAIVDMRSSLTTRSSNP

SEQ ID NO: 117238 - protein, 190 aa, Gossypium hirsutum
  Clone ID: AI730176.1.pep
FAHLRQLPVLVPYMPTENPRLRDTAYEVALVALATNPSFHKDLLSTVKSWPRVIYSALPVISAIEPQLNTSSMTDALKEALAELYVINGQYEKAFSLYADLMKPDIFDFIEKHNLHDSIREKVVQLMMVDCKQAVNLLIQNRDLIAPSEVVSQLLNTRNKCDSRYFLHLYLHSLFEVNPHAGKDFHDMQV

SEQ ID NO: 117239 - protein, 168 aa, Gossypium hirsutum
  unsure (1)..(168): unsure at all Xaa locations
  Clone ID: AI730171.1.pep
DDLIIKAHAKFGNKWATIARLLNGRTDNAVKNHWNSTLKRRRSAEDGDSVQESERRSXKFPRSGSISNPGSPSGSDVSDLGLSVSESTPHSRVSTALTLGRSWSDELVELNNDNSCSDKESGSVXEKHDNGTKTASLGTELLAAMPEMIXKEVRNCMAEFGFHNQCWG

SEQ ID NO: 117240 - protein, 59 aa, Gossypium hirsutum
  unsure (1)..(59): unsure at all Xaa locations
  Clone ID: AI730155.1.pep
QHDAFIALPQPRFHGLGCSHFARXYYGNRFCFLFLRLLRCFSSPGCLLSAHGFSSSSKG

SEQ ID NO: 117241 - protein, 170 aa, Gossypium hirsutum
  unsure (1)..(170): unsure at all Xaa locations
  Clone ID: AI730126.1.pep
MGSSPELFSMSILFLCALFSMRVRAREXFGKFPGVNTNEKETRTREQEHETFVPQTTRKPXEEQEPGFIPETQDGCGLXGHESSSGSSSSSSRASFTTGESCEAYVTPVRCRPEETYGSIPESSGREKRSWXGRSAERSTGRREWGEAMFGEKGWSGGGDERETGDGGGG

SEQ ID NO: 117242 - protein, 180 aa, Gossypium hirsutum
  Clone ID: AI730057.1.pep
YIKCFKSGCALVSMMVRHGFYPETKTYTALMKILVEYENFDEALSLMDQASLEGHQLDVLMYNTILKKASEKVRIDIIEFIIERMHQDKVQPDPVTCNYVFSAYVDGGFHNTAMGALQVLSMWMISYEDMTLEEKKIEFEKDFVSSEDLQAESKILQVFKDYDEHLAAALLNLRWCAILG

SEQ ID NO: 117243 - protein, 182 aa, Gossypium hirsutum
  Clone ID: AI730053.1.pep
MSSNKKKLVLNTVSVSLGCSSSCRKPKLTSFFNPKPKLKLKIKPKSHSLCNNYSSSSSSTKKTTHCSFSENETGTSFSPGTDTAMYWDMDIDTDGPDSANKCSMATVRGFGHVGGDSLAVEKDSDDPYLDFRQSMLQMILEKEIYSKDDLKELLNCFLQLNSPYHHGIIVRAFTEIWNGVFS

SEQ ID NO: 117244 - protein, 197 aa, Gossypium hirsutum
  Clone ID: AI730010.1.pep
VYNTVISICGRSNNWVETEGLWRRIQENGYIGTQVTYSLLISIFVRCNQCELAIDAYTEMIRNGVEPRDDIMHAMINACVKEEKRDLALSIFQKMLDDGLKPNLVACNALINSLGKGGEIKLAFKIYDIMISLGHKPDDFTWNSLLGALYKANRHADALHLFERIRQQNELISLHLYNTALMSCQKLGSWDKALQLF

SEQ ID NO: 117245 - protein, 192 aa, Gossypium hirsutum
  Clone ID: AI729974.1.pep
VSKFPAKATAAFCLITAGCFTSQANLLPFSDSPVSQGILRSSRAICTVAITVADYKYSLYGLPNDCDEYRRLLSEVHLRSAKRLLKLCEINKGFYVKAGQFVSSLRQIPKEYSLTLSSLQDQVVPYDFKVIKEVLVSNLGQDPSELFTWFNEQPIAAASIAQVHHAMLKDHQEVAIKVQYPGIEKKMKLDTR

SEQ ID NO: 117246 - protein, 179 aa, Gossypium hirsutum
  Clone ID: AI729971.1.pep
MEHSADHSQHAPPPPSTVASLPSSASTEVREEESNSGQRLLHRQHRQERRPQSSGGSSYRLNISIYDESRFDVSDDVWYCVIVLIAFWLFAASITLMVGFYGSVSLQISPHSSHLVRPNSFFVQSIEFEESDKQKPGLMVYGFHRPPPLDVEISWTETHDIFIPPNFHKEWLFFLNERS

SEQ ID NO: 117247 - protein, 47 aa, Gossypium hirsutum
  unsure (1)..(47): unsure at all Xaa locations
  Clone ID: AI729931.1.pep
TTGTTVGQVTEVTHDRCWPIVKVAGDRTVVLDMXTPWCSPCKVXTHN

SEQ ID NO: 117248 - protein, 184 aa, Gossypium hirsutum
  Clone ID: AI729929.1.pep
QKKKSLFLSLKDRRTRRSSLAMAADVSSLHRVLSGYKDELTVGNESGGPKSTALITRDLLGFGGGGSAFTDTKNDQSQELDLDLHVPNGWEKRLDLKSGRVYLQRCNSTYSSSSSDGTKHQTNPTVAKLQDLNIPTSPLPCKPLLNLFDESNLELKLVPSSSNYQSVCTLDKVKSALERAEKEP

SEQ ID NO: 117249 - protein, 168 aa, Gossypium hirsutum
  Clone ID: AI729912.1.pep
VAGKFEEVVIVISIFLTGFCASYLKLYPTMKPYEYGFRVFVLTYCILMVAGNRTREYSQAVLTRLVLIAAGAGVTLVVNICIFPIWAGESLHKLVVKNFKDLATSLEGCVNGYLKCVEYERIPSKILTYQAADDPLYNCYRSVVQSTSEEDTLLGFATWEPPHGPYRH

SEQ ID NO: 117250 - protein, 104 aa, Gossypium hirsutum
  Clone ID: AI729909.1.pep
MIETMFYSFSIRGGIAGISPASQCLSFIQNYAKNSLSSRFISKIPSYEPSFTVSYLINSCGFSPESAFSVSETVHFESPQKPDSVIGFLKKHGFSQSQIRSLIN

SEQ ID NO: 117251 - protein, 82 aa, Gossypium hirsutum
  Clone ID: AI729908.1.pep
MATSISLNLAFFAVFFMVVGSPLAQGAVTFCQFTNSLPPCIGYLTGNGAGGFPPICCGGIKSLNSPAQTTPNRQAACKCIKI

SEQ ID NO: 117252 - protein, 182 aa, Gossypium hirsutum
  Clone ID: AI729904.1.pep
GPQPAAQPSGGIGFGVSAAPASPFGSSSTIGQTPANPFSGTSANPFSIKPPSFNSASFTTSTTTSNPFQSTSSSLFGSSSSTTPSIFSSSAPAFGTGSSLFSSSVSPSFSSSPSIFGTGAAPATTPTFATGLNFGSSQGSSLFNSTPAIGQASSTFGQNTSSFGPTSIFNTPSTGFSGNMFS

SEQ ID NO: 117253 - protein, 184 aa, Gossypium hirsutum
  Clone ID: AI729890.1.pep
LLSGFQVEIGSISSDIKILQEKSMDMGLKLKNRKVAESKLAKFVEDIIVPPRMVDIIVDGEVNDEYMRTLDILSKKLKFVDTDPMVKDSKALKDVQPELEKLRQKAVSKVFDFIVQKLQALKKPKTNIQILQQNVLLKYKYIISFLKEHSKEVHLEVRAAYIDTMNKVLSAHFRAYIQALEKLH

SEQ ID NO: 117254 - protein, 82 aa, Gossypium hirsutum
  unsure (1)..(82): unsure at all Xaa locations
  Clone ID: AI729878.1.pep
MATSISLKLAFLVVCCMVLGAPLPQGAVTVGQFTNPPPPAINNLKGIXSCSLPPHCCNGIKTLKSPPQKKPHTRTPFTYISN

SEQ ID NO: 117255 - protein, 76 aa, Gossypium hirsutum
  unsure (1)..(76): unsure at all Xaa locations
  Clone ID: AI729874.1.pep
MAISMSLKLACVVVLCMELGAPLAQRAVTCGQITNSLAGXMRYLRSTGAGGGHPCCCRWIKSLNSAAQTTPYRQSP

SEQ ID NO: 117256 - protein, 208 aa, Gossypium hirsutum
  Clone ID: AI729848.1.pep
GRVDGGMVSLEQLNVAHNMLSGKIPASICRLPKLENFTFSYNFFTGEPPVCLGLRAFDDRRNCLPARPLQRSAAQCRSFLSRPVDCNSFRCAPFVPSLLSPPPPSPPPVVVLSPPPPSPVFIPPSPPPPPPPPVYSPRPPSPSPPVYSPPPPPPPVYSPPLPPPSPPPPVYSPPPPPSPPPPSPPPPVYSPPPPPSPPPPSPPPPTYP

SEQ ID NO: 117257 - protein, 112 aa, Gossypium hirsutum
  Clone ID: AI729846.1.pep
TDGFCRIGDLESAKKVSDKMLSDGYVSPCSFAYYSLIRSMVNEGELDMALEMSKEIIKRKWVPPFEAMEGLVKGLVERSRSEEAKQVVEKMKKRLKGDALESWGKIEAALPL

SEQ ID NO: 117258 - protein, 87 aa, Gossypium hirsutum
  Clone ID: AI729840.1.pep
NHYELVAAEYLGDGIVAEPGWLQFMRKWGPTIVYDSRTELDKIVHVLPVMLQSSVKNFFYKLPVELYGEEGPTGPKEKNNWVGDERG

SEQ ID NO: 117259 - protein, 198 aa, Gossypium hirsutum
  unsure (1)..(198): unsure at all Xaa locations
  Clone ID: AI729822.1.pep
GANLREIFXSXRFHTDAPHFWKXLSSSPFQKKPNSXERTPLQLPYRSADVSSEDTIAETSSLKVQVALLNMIANLSQNKRSASALEVVMKKVTGLVVGIACSGVAGLHDASVNALKGLASIDPDLIWLLLADVYYPSKKKDLPSPPTLDFPGISEILPPVTSCKEFLYVKYGGQSYGFDVDFKSVERVFRKLQTFGVI

SEQ ID NO: 117260 - protein, 211 aa, Gossypium hirsutum
  unsure (1)..(211): unsure at all Xaa locations
  Clone ID: AI729807.1.pep
MVAAKWNCFSFQLVFAISFISSIAEVCNGGRTNSFVRNSDLSRDMPLDSDVFRVPPGYNAPQQVHITQGDHLGNAVIVSWVTPDEPGSNSVFYWAENSELKNSAQGIVLTYKYFNYTSGFIHHCTITDLEFDTNYYYKVGIGNSXKRFWFVTPPAIGPELTYTFGLISDLXATHDSNNTLTHYELNPAKGQTXLFLXRLSYADAYPFMTSQ

SEQ ID NO: 117261 - protein, 83 aa, Gossypium hirsutum
  Clone ID: AI729794.1.pep
MAASLFQKPSAILFTGTQFPVSISKDIPIEPSPCIHFNYHFRSKANNQKKGLLQVKATVGAGTQSVSKSSETKDLDGNQLEKK

SEQ ID NO: 117262 - protein, 112 aa, Gossypium hirsutum
  Clone ID: AI729784.1.pep
MNGETSFELDCSDSDFVEVDPTGRYGRYNEILGKGSSKTVYKAFDEYEGTEVAWNQVKLHDLLQSSDDLERLYCEIHLLKTLKHENIMKFCTSWVDTSNRNINFVTEMFTSG

SEQ ID NO: 117263 - protein, 70 aa, Gossypium hirsutum
  Clone ID: AI729765.1.pep
DVVEGRVAADNSIGRFISDTVASLPKLSTSVFDKLVNDSLQDQLLLLYLSSITRTQLGLAEKLNTAAQIL

SEQ ID NO: 117264 - protein, 128 aa, Gossypium hirsutum
  unsure (1)..(128): unsure at all Xaa locations
  Clone ID: AI729763.1.pep
QADYIIWRGEPIGEYSVRSGHRLLLQEGQTHTQQNFNHYYKILWCLDLPSKLKITNXRIFNNYLPTFSKLHYRRLMGSALCRRCQNGVEVREHVFKDCPIAKETWLMLGFSWNNQEENSDFNAWSTRP

SEQ ID NO: 117265 - protein, 59 aa, Gossypium hirsutum
  Clone ID: AI729760.1.pep
RSRPLFFFFFFFFFFFFFSFLFFFFFFFLFFFFFLFFFLSFLILPVLIFCFLVLLVLCY

SEQ ID NO: 117266 - protein, 140 aa, Gossypium hirsutum
  unsure (1)..(140): unsure at all Xaa locations
  Clone ID: AI729753.1.pep
GRVDLDLSMNQLNGEIPSSFSNLNFLNHFNVSYNNLTGQIPTSTQLQSFGNFSYMGNHLYGPPLTKNRSTYRTPTNVANNGSRSXGSNVNWLYVSIVLGFVMGFSSVVAPLFYIRSWRHEYYRKLDHIGRKLYMSLGYYG

SEQ ID NO: 117267 - protein, 130 aa, Gossypium hirsutum
  Clone ID: AI729750.1.pep
GRVDFKNKCNVGYAFINMIEPSQVISFYQAFNGKNWEKFNSEKVASLAYARIQGKAALIAHFQNSSLMNEDKRCRPILFNTDGHNVGDQVPFPVGVNVRTKPGKAARSFNNKENNQESPSNSENEANSSN

SEQ ID NO: 117268 - protein, 220 aa, Gossypium hirsutum
  unsure (1)..(220): unsure at all Xaa locations
  Clone ID: AI729743.1.pep
ISHLPTGYMWSSHLVPKPKDWGPLVDVVGYCFLNLGSKYRPREKFVRWIQKGPQPIYIGFGSMPLDDTKKTTDVILEALKDTGQRGIIDRGWGDLGQFTKATENVFLIEDCPHDWLFPQCSAVVHHGGAGTTATGLKAGCPTTIVPFFGDQFFWGDRVHQKGLGPAPIPISELXIEKLSNAITFMLQPEVKSLAMELAKLIENEDGVAAAVNAFHRHLPP

SEQ ID NO: 117269 - protein, 116 aa, Gossypium hirsutum
  unsure (1)..(116): unsure at all Xaa locations
  Clone ID: AI729741.1.pep
RFRGVVHEFVVPEDQYILHTAESQNITLPFACRHGCCTXCAVRVKSGQIRQPEALGISAELKAKGYALLCVGFPSSDVEVETQDEDEVYWLQFGRYFARGPIERDDYALELALGDE

SEQ ID NO: 117270 - protein, 130 aa, Gossypium hirsutum
  Clone ID: AI729725.1.pep
DHQAMDRAHILGQRKVVNVHRLIMRGTLEEKVMSLQRFKLSVANAVINAENASLKTMNTDQLLDLFASAETSKKGATASKRSDSGIDGVPKLMGTGKGLKAILGGLEELWDQSQYTEEYNLSQFLSKLNG

SEQ ID NO: 117271 - protein, 116 aa, Gossypium hirsutum
  unsure (1)..(116): unsure at all Xaa locations
  Clone ID: AI729724.1.pep
FKGFTMLKQAPSKNQRYKGFKVKHVLQICALVALCIWLFNQARNSYNNKGSGIFQTVTTEHSHAIVKLGRKDLDPQGERSSSADIXEKMEKKVEXSKFXESENEWXXGWGXXXRRX

SEQ ID NO: 117272 - protein, 84 aa, Gossypium hirsutum
  Clone ID: AI729721.1.pep
RGITKGTHTQNAATTTTLKTLALILLMGSLSGDPSSLVQLDIILIVGMLRCPASTVMRILAVQCGDRVDRDSCCGKGRYRSEKV

SEQ ID NO: 117273 - protein, 212 aa, Gossypium hirsutum
  unsure (1)..(212): unsure at all Xaa locations
  Clone ID: AI729711.1.pep
AIWVPSVANQNKETEISITRNLGRGYSSLYAAEELSDIKKAANHEVIDEDLLLEDLRVSEAMSKKYLKVSMAVTVKEAMKCMHDSHQNCVLVVDKDDLLEGILTYGDIRQYLSKKQSDVSIDDSTALDVNTCLVSSVCTRRITYRGQKRVLLTCYPKTNLAIAKVLMEAKEIXQLPLVKSSGEARKGRKRKIVGVLYYETIWNCLREEINHX

SEQ ID NO: 117274 - protein, 208 aa, Gossypium hirsutum
  unsure (1)..(208): unsure at all Xaa locations
  Clone ID: AI729700.1.pep
MWNQPYRKNDTEAGPRPLYPMMLEPAEMRWAFIRKIYSIIAVQLFATIAVAATVVTVHPISNFFVSTGAGLALYIVLIITPFITLCPLYYYYQKHPVNYLLLGVFTVSLAFAVGLTCAFTSGKVILESVILTTVVVVALTLYTFWAXKRSHDFNFLGPFLFGAVLVLMVFALIQILFPLGRISVMIYRCXGSIIFCGYIIYDTDXLIK

SEQ ID NO: 117275 - protein, 134 aa, Gossypium hirsutum
  Clone ID: AI729699.1.pep
ALSAGYYDAYYKRAQQVRTIIRKSFKAALDENDILISPAAPSAAYKIGEKKNDPLAMYAGDIMTVNVNLAGLPALVLPCGFVEGGAVGLPVGLQIIGAAFDEEKLVKVGHIFEQTLEGYNFVPPLITDVGGASA

SEQ ID NO: 117276 - protein, 217 aa, Gossypium hirsutum
  unsure (1)..(217): unsure at all Xaa locations
  Clone ID: AI729696.1.pep
FVINNHGIDTEEDYPYQGREHTCNKEKLKRHVVTIDDYTDVPMNNEKKLLQAVATQPVSVGICGSXRXFQLYSKGIFTGPCSTSLDHAVLIVGYGSKNGVDYWIVKNSWGTRWGMNGYIHMIRNTGKSEGICGINMLASYPIKTXPNPPPSPPXGPTKCDFFTYCSAGETCCCTHRIFRICFLWKCCGSDSTVCXXXNXHCCPHNYPICYTKNNQCL

SEQ ID NO: 117277 - protein, 98 aa, Gossypium hirsutum
  Clone ID: AI729679.1.pep
SRQAETSSYMKKKYTSRDISFKILDFISELRGVEEKKLNLAANSGPKFEERRTSVEVYFDAAFDQQLIKSASGLVVRNEGGEILASKSVIHTSIATSF

SEQ ID NO: 117278 - protein, 218 aa, Gossypium hirsutum
  Clone ID: AI729675.1.pep
MTAITIETLKEQQQIIQQQSESAAESTQPLPSLDEVEQILGYEFNNKRLLEEAFTHASLGLGFSNERLEYVGDSVLNLLFTKQQFFEYPDLPPGALTRLRAANVDTETLARAAVKHGLHRYLRHKKPLLKEQIRQFSEEIQRYPLHSNGLVDVPKALADLVESTIGAVFIDTNCSIDVVWKVFKDLLEPIIKRETLKIHPVTQLYKLCSKRNLKVKFV

SEQ ID NO: 117279 - protein, 178 aa, Gossypium hirsutum
  Clone ID: AI729634.1.pep
MTADGSNPLISVQPNALKFVFELEKPSFCDLKVVNNTEHHVAFKVKTTSPKKYFVRPNTGVVQPWDSSVIKVTLQAPREYPPDMQCKDKFLLQSTVLPPNTDVDDLPADTFNKEITREIQECNLKFSYLTPSPPENPKYKGIRSFSNQPPDSNPPVHHLKDEKYPFGNHSACYRTRIF

SEQ ID NO: 117280 - protein, 78 aa, Gossypium hirsutum
  Clone ID: AI729622.1.pep
YVKFLSGTMSGSNRHKLFLSILSNSFYAQSGFKPTWPQNNVCLTLPQVSLPGDTTHSQVDTDAAEPPETGSLFITYSN

SEQ ID NO: 117281 - protein, 206 aa, Gossypium hirsutum
  Clone ID: AI729603.1.pep
IVLIMGTKLQVILAKMAHRVEDQNTVIHGAPLVQPNDNFFWFNNPKFVLTLLHYTLFMNAFEVAFFVWVTTQYGIKSCYHEHREVIATRVVLAVTVQVICSYVTLPLYALVTQMGSNFKKAVLEEQTTNAIKQWHAGVKLKRKKQRLSSQAAADDFPENSTTISTVDSSSHQPPTLASFEICSSPEIQEAGPAMHTVAVEIQMASV

SEQ ID NO: 117282 - protein, 69 aa, Gossypium hirsutum
  Clone ID: AI729592.1.pep
QQRSMPNWLWLKRRRPKVAPSSRRLLLRPKGKLQLSGRNMSVREKLTRTKFVRICFLTPPPGSFFPFSF

SEQ ID NO: 117283 - protein, 202 aa, Gossypium hirsutum
  Clone ID: AI729590.1.pep
IYQWALPVVSSNSVAVKILYPIFWGLMSLSTFGNDLEPTSHWLEVMFSICIVLAGLMLFTLLIGNIQVFLHAVMAKKRKMQLRCRDMEWWMKRRQLPSRLRQRVRHYERQKWATLGGEDEMELITDLPEGLRRDIKRFLCLDLIKKVPLFHNLNDLILDNICDRVKPLVFSKDEKIIREGDPVQRMVFIVRGRIKRIQSLSK

SEQ ID NO: 117284 - protein, 175 aa, Gossypium hirsutum
  Clone ID: AI729585.1.pep
EDDDDEDDEEEEEEEEEEGKEEENGERKEDERTKLDDGFFEIEAIRRKRVRKGQLQYLIKWRGWPETANTWEPLENLQSCSDVIDAFEESLRSGKHIRKRKRKYGGPHTQSKKKQPCSSGSTYNVTGLELGGVDKTPLVPFDNTGIADLSASSTVIVLAREGERNGNSNVRAKRI

SEQ ID NO: 117285 - protein, 181 aa, Gossypium hirsutum
  unsure (1)..(181): unsure at all Xaa locations
  Clone ID: AI729579.1.pep
MSDSDDDSGGEEYLFKIVIIGDSAVGKSNLLSRYARNEFNPHSKATIGVEFQTQSMGIDGKDIKAQIWDTAGQKRFRAVTSAYYRGAVGALIVYDISRRTTFDSVGRWLDELKMHSDTTVARMLVXNKCDLETIRDVSVEEGKXLXEEHDLFFMETSALDSTNVXKAFELVIREIYXNVRR

SEQ ID NO: 117286 - protein, 172 aa, Gossypium hirsutum
  Clone ID: AI729567.1.pep
MKSHNMLFLLRFQYPCPSPSPFAFGCTRPKPYRSPQLSFSTPRRPRRSRSSRSPWNHSHNSHSLSLKRTIDFESSADNPNLKLLLHFDPISPLSSFDRFVSFSSDAFQDLLHSVHIDTQTRTFRFSCRKSTLQFLAGFLVCGFLVAFAFRVCFRLGLAFKARFSPKQKVIVR

SEQ ID NO: 117287 - protein, 175 aa, Gossypium hirsutum
  unsure (1)..(175): unsure at all Xaa locations
  Clone ID: AI729551.1.pep
LKHYVNEAKNETSSANATRKSQKKKGTPVPPQVVLQPLSKRNISGDGGKAGMKGGINEGLRLCELQYGSYCIWHEKNREDMKDSMVKKLKDQLFVARAYYPSVAKIPAQNMLTRDLRQNIQELERVLSESTTDADLPPEIQKKSERMEATIXKSKSVTMDCHNVDKKLRQIFDLT

SEQ ID NO: 117288 - protein, 176 aa, Gossypium hirsutum
  Clone ID: AI729543.1.pep
EKLLRLLDMYETLADLVIDIDALFSEDGGSFVRLEFHKLLEGLADSVKAAFNAFGVAVSSNGSLYPFPGGGVHPLSKYVMNYISMFPEYCSTLNLLLEDQHSDVASLVSEPQCGPTASLSTSCPMACHLRSITSSLESNLHKKSKLYKDEALQHIFLMNNLHYMVQKVKGSELRPF

SEQ ID NO: 117289 - protein, 253 aa, Gossypium hirsutum
  unsure (1)..(253): unsure at all Xaa locations
  Clone ID: AI729528.1.pep
MVKSWMKNASGIKVQQLDIQQQALKLTANSMYGCLGFSNSKFYAKPLAELITQQGREILQSTVDLVQNNLNLKVIYGDTDSIMVYSGLDDIAKAKAIAGKVIQEVNKKYRCLEIDLDGLYKRMLLLKKKKYAAVKVQFKDGMTYEVIERKGLDMVRRDWSLLSKELGDFCLAQILSGGSCENVVESIHNSLMKVQEKMRNGQVELQKYIITKTLTKPPEAYPDAKNQPHVQVALKMKXSGYSTGCSAGDTIPY

SEQ ID NO: 117290 - protein, 230 aa, Gossypium hirsutum
  unsure (1)..(230): unsure at all Xaa locations
  Clone ID: AI729515.1.pep
MNHLHRYASTRFGRLPKTFSKLSNLRREVPWWNQVLDPGIPTLTKWNYIILCTCLVALFLDPLYFFLPVIGAPRCMQIDLCLCIFVTFFRIVADLCFFILIIIEFMTAFVPPSPTVFRRGYLLLDRKAXSIPHLKSSFIIXDFAAAPPLPPIVLWFTFPASNIVSGALAIYTLXSSFVLLPIIPPILCPLPYNSDGTLHRTGFCLPNTAWSWGTLSPRSTLPFLPLCSLA

SEQ ID NO: 117291 - protein, 51 aa, Gossypium hirsutum
  Clone ID: AI729510.1.pep
FRFRKQTRRLRNTVWWRNVKLTGALIILILIIIYVVLAFVCHGITLPTCIK

SEQ ID NO: 117292 - protein, 217 aa, Gossypium hirsutum
  Clone ID: AI729509.1.pep
EESFEPVAEVLQRIGSDKIRSLPFIYNDICRTKLAIKAIHGDDVRKYGPFWSVIESNWSPLFHHPLYVAAYFLNPSYRYRPDFLMNPEVIRGLNGCIVRLEADNGKKIAASMQIPDFVSAKADFGTDLAISTRSELDPASWWQQHGISCLELQRIAIRILSQTCSSIGCEHNWSAFDQVHIKRHNCLSRKRLNDQTYVHYNLRLRERQLGKKPDELV

SEQ ID NO: 117293 - protein, 155 aa, Gossypium hirsutum
  unsure (1)..(155): unsure at all Xaa locations
  Clone ID: AI729431.1.pep
KSLTFPRKSSSTKRHGWKIALALDTGGVPGNGEDSLNSDSSNLGGTRLGRVXSAGGRXLLKKLNSARKNFPMKIFLLLLGFYTANALATILGQTGDWDVLXAGVVVAAIEGIGMLMYRKSPSLKTGRLQSIVVMVNYWKAGVCLGLFVDAFKLGS

SEQ ID NO: 117294 - protein, 208 aa, Gossypium hirsutum
  Clone ID: AI729421.1.pep
MVSSVHFSPPNVLHNHTSLSSISNNPSKTLHFPIKCTSPTSESSQSDFPSPISHETTTSPESFPIEKRRRSEIVRERRSRPDIAKPEPPNFEVGWRRTKEINLEKPKGYVIMDFLEKLEGLMGREFGSTELMAKAGEIVAERAREEAEVLRDEGEVEDRMVTELFRVLKLMEMDLAMVKAAVKDETLSERLEQAKARCRQAILVANSF

SEQ ID NO: 117295 - protein, 224 aa, Gossypium hirsutum
  Clone ID: AI729408.1.pep
MSKDDGESSADINITVKFSGRSIPISIPKDSTIKQLKSHLQPLTNVLPRGQKLIFKGKLLVDAMTLKESEVMNGAKLMLMASQGLHQGGGPILKEAQTRPISRGKETEYKRPDARTEIVMEKDRLQRWKTTGVIALADCNLKAIPNEVWDCGSSARVLDVNNNSIQDVPNKISCVNSIQKLFLDGNGISDEAIRWEGLASLKYLTVLSFTRNQLMNLPSALGSL

SEQ ID NO: 117296 - protein, 227 aa, Gossypium hirsutum
  unsure (1)..(227): unsure at all Xaa locations
  Clone ID: AI729388.1.pep
VQDAGVTVLGTVPSLVKTWKNTDCIKGLNWTKIKSFASTGETSNVDDDLWLSSKSYYKPIIECCGGTXLASSYIQASPFQPQAFGAFSTASMTTGLVILDEHGVPYPDDKACVGEVGLFPLYLGATDKLLNADHNDVYFKGMPTFKGMRLXRHGDILKRTVGGYIVVQGKADDTMNLGGIKTSSVEIERVCDRADESILETAAVSVAPPDGGPELLVIFVVLKKGFN

SEQ ID NO: 117297 - protein, 188 aa, Gossypium hirsutum
  unsure (1)..(188): unsure at all Xaa locations
  Clone ID: AI729353.1.pep
MAISTISSTLFPSLTIPNTSSPKPRFTILSHSSPLSFNPLKLPNSSLKHSQSTTNIFAAPEALEETPEVGGSEVPTSSVSVEADKTAPXQKIRIKLRSYWVPLIEDSCKQILDAARTTNAKTMGPVPLPTKKRIYCVLKSPHVHKDARFHFEIRTHXRLIDILYPTAQTIDSLMQLELPARVDVGMXL

SEQ ID NO: 117298 - protein, 62 aa, Gossypium hirsutum
  Clone ID: AI729321.1.pep
HTKIRRVETGGFSAIWRTRDHLAQQEKPVLEAFAPSLTRVTLFPDNSPLYESEFRAFRLTLL

SEQ ID NO: 117299 - protein, 119 aa, Gossypium hirsutum
  unsure (1)..(119): unsure at all Xaa locations
  Clone ID: AI729289.1.pep
NYSTVIAHAGDGNFHTVILFDPNEEEHRREAERLNQFMVYTALSMEGTCTGEHGVGTGKMNYLEKELGIDALHTMKRIXTALDPNNIMNPGKLIPPHVCFQWSSVAVAKCMRAIQWLFC

SEQ ID NO: 117300 - protein, 211 aa, Gossypium hirsutum
  unsure (1)..(211): unsure at all Xaa locations
  Clone ID: AI729286.1.pep
GSTSIKAGDILXVPLSACASNFPRYASDYGMIVPNGSYAITASHCVQCSCGPGSRNLYCMPSSLAVSCSSMQCKSSNLKLGNVTVQQSSAGCNVTSCAYGGYANGTIITWLSSSLQPRCPGPQQFPPLLAPPTHVTRDSAFAPAPAPQSDGGSTTTVPKTVPSTVSLPGLAPAGAPIGSTSDASTLVNSVAAVPTALMIFLLIKLIPPFSL

SEQ ID NO: 117301 - protein, 169 aa, Gossypium hirsutum
  unsure (1)..(169): unsure at all Xaa locations
  Clone ID: AI729284.1.pep
SHQTQRARNGPIRFFKPGNQRHRAVPASRHPGESAVPHTPPPRDHRTPHNDPGPPSTRAKKTPATPAKVRRSRARHSPLLDAGEPTRRAVRRSPLCATQKASATSPHRQEPELSYDNHHDSLPEHQPILNPIAIHVKPFHLSQTCLKPTTXVPTXXXXXXVXSSPPPRC

SEQ ID NO: 117302 - protein, 182 aa, Gossypium hirsutum
  Clone ID: AI729263.1.pep
EKPKLPFFSKHNNNGRHSKPSWRWPSCHQPKTHSFRTDETPESWFSNSSESPSFSTASDESRTGAGTGGVDSVETVIQGVRLRSERLFYEPSEPKLGAESETESPYKETTVLSTESMDPFVDFRDSMEAMVESHGLKDWESLEELLGWYLKPNGESSHGYILGAFIDLLLKKKCNLLMPVRP

SEQ ID NO: 117303 - protein, 161 aa, Gossypium hirsutum
  Clone ID: AI729259.1.pep
LRYPGVHGSSLLRSRSQLFPGLLLMIRSSDFPLRVPTALSRRAPNSSSFLIFGSSLLSFSLFSSSLLLRESSLFVFFSELLLVFVVFHPRLSRSLSPLITLPLVIILWLTFLLILCFYPLFLSVVCVVWLLSAWRWSTFPGLAPLRPSASRLVVFAPSPYP

SEQ ID NO: 117304 - protein, 205 aa, Gossypium hirsutum
  unsure (1)..(205): unsure at all Xaa locations
  Clone ID: AI729251.1.pep
GLWVLMHSLSVRIEDGESQTAFTSICDFIHNFFICQECRQHFYEMCSSVKSPFTKARDFALWLWSAHNEVNERLMKEEASLKTGDPKFPKIIWPPKQLCPSCHHSQGPKNKGGSQINWKRDEVFKFLISYYGNTLVSLYKEKGLLXGDGTTDILEDSSTNAVVVPVGAALAIALAXCAFGALACYWRSXQKNRKYYXQLHSLKNI

SEQ ID NO: 117305 - protein, 198 aa, Gossypium hirsutum
  unsure (1)..(198): unsure at all Xaa locations
  Clone ID: AI729244.1.pep
PILILMPGLTGGNENSYPKHMLTKARSKGWRVVVFNSRGCGNSPVTTPQFYSASFVGDMREVXEHVSGIYPEANLYAAAWSLGANILVRYLGDESHACPLSGAVSLCNPFNLVYAFEEFTKGFNRVYDKALAKSIRNIFKRHILLFEDIGGEYNIPLALNARQVRDFDEGLTRVSFGFKSLDEYYYKASCFHSIKHVH

SEQ ID NO: 117306 - protein, 201 aa, Gossypium hirsutum
  Clone ID: AI729234.1.pep
RRDTEEWMRHRQLPPDLQDRVRRFVNYQWTATRGVDEEAILKSLPLDLRRQIQRHLCLALVRRVPFFAQMDDQLLDAICERLVSSLNTNDMFLVREDDPVQEMLFIIRGKVESSTTNGGRTGFYNSITLGPGDFCGEELLTWALIPHSDSIINLPLSTRTVKSITKVEAFALRAWDLRYVAKQFKRLHSEKLAHAFRYYSH

SEQ ID NO: 117307 - protein, 201 aa, Gossypium hirsutum
  unsure (1)..(201): unsure at all Xaa locations
  Clone ID: AI729227.1.pep
MWDLNDSPDRSRGEESEGCSSPVDGEKGKGKRVGSVSNSSSSAVVIEDGSEEEDAAALKKRNSNMIFGFSVPVKSGGPXPVTRQFFPLDQDPEMRAVPTGTAQGFPMAHWVGVKFRQSEPLAVAKSVEATNPMKKSKRGPRSXNSQYKSVTFYKKTGRWESHIWDCGXQVYLGGFDTAHAAARAYDRAAIKFRGXVEADIN

SEQ ID NO: 117308 - protein, 183 aa, Gossypium hirsutum
  Clone ID: AI729223.1.pep
KFRVQLEDSGSLRERIRAVVLEIESATRLMQASLLLVHQSKPIPEVLQKANSQINVLKDLYNKLAEVVRECPGQYYRYHGDWRSETQMVVSLLAFMHWLETGNLLMHTEAEEKLGLNNSDFALDLEDYLVGVCFMSNEMPRYVVNQVTAGDYDCPRNVLKFLTDLHAAFHMLNLRNDFLRKKF

SEQ ID NO: 117309 - protein, 81 aa, Gossypium hirsutum
  Clone ID: AI729212.1.pep
INFLLFGMHSAVLMDQCNARNQGGGDFHSKLIDQNSELKCKHIYNLWYFCRTAHTARCLPHLFIQPLTISDSYNQVSIIQT

SEQ ID NO: 117310 - protein, 197 aa, Gossypium hirsutum
  unsure (1)..(197): unsure at all Xaa locations
  Clone ID: AI729193.1.pep
GSGGMFLSYCMVFGMSLMDSPSWRLMLGVLSIPSLLYFAFTVFYLPESPRWLVSKGRMLEAKQVLHRLRGREDVSREMALLVEGLGIGGETSIQKYIIRPADELDESQEPGADKDKITLYGPEEGLSWVAXPVPGQSILSIASRPGSMVNQSMPLMDPLVTLFGIVHEKLPETGSTPIMLFPNFGTMSTTSQPLATN

SEQ ID NO: 117311 - protein, 181 aa, Gossypium hirsutum
  unsure (1)..(181): unsure at all Xaa locations
  Clone ID: AI729186.1.pep
TIGLHDLRXRLSIIPQDPTLFEGTIRGNLDPLEEHSDHDIWEALEKSQLGDIVRDKDLKLDTPVLENGDNWSVGQRQLVSLGRALLKQAKILVLDEATASVDTATDNLIQKIIRTEFMNCTVCTIAHRVPTXVIDSDLVLVLTDGRVADFDTPQRLLEDKSSMFLKLVTEYSSISSVHTEF

SEQ ID NO: 117312 - protein, 185 aa, Gossypium hirsutum
  unsure (1)..(185): unsure at all Xaa locations
  Clone ID: AI729150.1.pep
VLVTAAAGGTGQFAVQLAKLAGNKVVATCGGKEKARLLKELGVDRVIDYKAEDVKTALKEFPKGVDIVYESVGGNMFDLCLDALAIRGRLIVIGLISQYKRKIGWTPLNYPRLEKLLSKSQNVSGFVLVXYGHLWKEHLLRLFHLYSSGKLKVVINQKRFSGLHXVADAVEYLHSGKSTGKVVVC

SEQ ID NO: 117313 - protein, 141 aa, Gossypium hirsutum
  Clone ID: AI729143.1.pep
NYQETETGDNQFITTEELRKDPALQDNLEKENQEEDITVQEEEHGKLQVDDGESKEQLYVPRRPHQNQRGGRRGYFVGRGGRSSGRGGVTYQNGHNQYYDQPANHYSRNHYNNRGRGGTGGGGHAYNNHDGNPSADVGVAS

SEQ ID NO: 117314 - protein, 142 aa, Gossypium hirsutum
  Clone ID: AI729140.1.pep
RSPSPSSSPPSRLASWVAPQWPLWRTPATPPPPSTAPSWPTPPLWSTPPPPWPTPPPWSTTPLPSPTPLPWCTPPPLWPTPPLWSTPPPLWPTPPPWSTPPPWLRPSPPSPPPTRTPTRCPPPLWLLPPLPLTLPPPPTPPM

SEQ ID NO: 117315 - protein, 96 aa, Gossypium hirsutum
  Clone ID: AI729133.1.pep
GGIRFTINGFRYFNLVLISNVAGAGDIVKVSVKGSRTGWMSMSRNWGQNWQSNAVLVGQSLSFRVTGSDRRTSTSWNIVPAHWQFGQTFTGKNFRV

SEQ ID NO: 117316 - protein, 157 aa, Gossypium hirsutum
  Clone ID: AI729113.1.pep
MISSSKFKAVDFYRKFPKDLTEASVSGAWLSIATALAMIFLFGMELNKYLTVSTSTSIIIDNSSDGDFLRIDFNISFPAVSCEFASVDVSDALGTNRLNITKTIRKFSIDPRHKAIEFHSEPVPHVSQHGDEVDDEAVEGSVSLNSDSFAKLSQEHP

SEQ ID NO: 117317 - protein, 168 aa, Gossypium hirsutum
  unsure (1)..(168): unsure at all Xaa locations
  Clone ID: AI729082.1.pep
MMVPRGNPARGRFWPQMLMAMAVAVVVLASNVGSVSADAYIYASPPPPYEYKSPPPPSPSPPPPYVYKSPPPPPKHDEKPYEYESPPPPPSKEKPYEYKSPPPPSPSPPPPYEYKSQPLPSPFPPRYVFKSPPPPPRPDEXPYDYTSPPWQPVERTYIPTPNSFSLPH

SEQ ID NO: 117318 - protein, 207 aa, Gossypium hirsutum
  unsure (1)..(207): unsure at all Xaa locations
  Clone ID: AI729081.1.pep
VVAPISGCSESNSLTVAQQQFKNLQPVTAPVNRLLVNKETLGERLHESTLDLKSKENPFLMPMQQLVTYEENLRNEFGVVFSDSLLNPSHKDSSLINCRTFGSSQDLICQATVSQHSLREFMDDWPKSQSDRSTISWPEVDVQSDMTQLSISIPMTASDFMSSTSSPSNEKLSSSPLRLSREFDPMHMGLGVCSVINEPXHNQANWI

SEQ ID NO: 117319 - protein, 196 aa, Gossypium hirsutum
  unsure (1)..(196): unsure at all Xaa locations
  Clone ID: AI729054.1.pep
RNEDPQTTSRPWDKERDGFVMGEGAGVLVMESLEHAMKRGAPIIAEYLGGAVNCDAYHMTDPRADGLGVSSCIERXLEDAGVSPEEVNYINAHTTSTLAGDLAEINAIKKVFXNTSKIKINATNSMIGHCLGAAGSLKAIATVKAITTGWVHPTINQFNPQPSXEFYTVANEKQQHEVNVAISNSFGCGGHNSVVA

SEQ ID NO: 117320 - protein, 198 aa, Gossypium hirsutum
  Clone ID: AI729052.1.pep
DNIKIYQAISDGTVNLVNKFFEMQRPDALKALDIYRRSGQQAERLSEFYEVCKSLDVGRGERFIKIEQPPSSFLQAMEEYVREAARSSAVRKDQADKPKEVLAIEYKKTPQEQEKRSPSPPPPEPEKVEKVEEPTVEPPDLLGLNDPVPVASELDEKNALALAIVPVAEQTTAAAAPIPANGNTSWELALVTAPSSND

SEQ ID NO: 117321 - protein, 166 aa, Gossypium hirsutum
  Clone ID: AI729040.1.pep
MAAITQNGSLDSFCTTTANGSTAFAADPLNWGVVAESLKGSHLDEVKRMVMEYRKPLVKLGGETLTISQVAAIAAHDSGVKVELSDDARAAVKASADWVLDGMNKGTDSYGVTTGFGSTSHRRTKKGAALQKELIRFLNAGIFGNGNDSCNTLPHSATRAAMLVRI

SEQ ID NO: 117322 - protein, 185 aa, Gossypium hirsutum
  unsure (1)..(185): unsure at all Xaa locations
  Clone ID: AI729023.1.pep
MAASVQLNLRSFKAPFNLKPIAKQFSKPGRIRCAATTPTKRYSITLLPGDGIGPEVISVAKNVLKLAGSLEGIEFSFQEMPMGGAALDLTGVPLPEETLSTAQRADAVLLGAIGGYKWDKKEKHLKPETGLLQLREGIKVFANLRPXTVLPQLVDSSTLKKDVAEGVDLMVVRELTGCIYFGKPR

SEQ ID NO: 117323 - protein, 239 aa, Gossypium hirsutum
  unsure (1)..(239): unsure at all Xaa locations
  Clone ID: AI729021.1.pep
KIAFGYDPECLLPSLPQTEFADAFEDATHLSSERFRAPITLTWRIKRFFNVGSEMNLKIAISQVRDFAKKIVREKKQELATKSSLDSVDILSRFLNSGHSDENFTTDIVISFILAGRDTTSAALTWFFWLIHKHPEVEKEILKEIKEKSDMLVFEEVKDMAYIHASLCESMRLYPPVPTDSKRAVADDVLPDGTVVXXRSVVTYAPYPMGKMENIWGSDWEEFTPEKWLPRDXAGXWXF

SEQ ID NO: 117324 - protein, 194 aa, Gossypium hirsutum
  unsure (1)..(194): unsure at all Xaa locations
  Clone ID: AI729012.1.pep
GKAKRKKLLSPKGMDVRPMMEVVKGAAFDRLQAADGCPASLRPGRWLDLYSGTGSVGIEAISRGCSEAHFVEMDPWVVSNVLRPNLEWTGFLDASVIHPVRVETFLEQADRFAGNGPFDYIIVTPPYTQFDYGMLMSQISKSPIVGEDTFIXEYPLRTDMLDSCGCLVXIXDRRFGRTHLXIYGPKWAHEEKKI

SEQ ID NO: 117325 - protein, 155 aa, Gossypium hirsutum
  unsure (1)..(155): unsure at all Xaa locations
  Clone ID: AI729003.1.pep
SATMAIYDVVQLVRADVSTVGIGIAASTASIILGGGTKGKRFAMPNTRIMIHQPLRGASGQPINVEIQAREIMHNKNNVTRIISASTGRPFEQVLKDIDRDRYMSPIXTVEYGIINGVIDRDSIIPLEPVPERMKAXLNYKEISKDPRKFLNPDI

SEQ ID NO: 117326 - protein, 214 aa, Gossypium hirsutum
  unsure (1)..(214): unsure at all Xaa locations
  Clone ID: AI728997.1.pep
PPPPVFSRNFPSDDDRMLIEVYLINHGESELDLRPDIVGGRYDAAAMTSNGKRQARALAVFLHSQGIRFDAIYCSPLDRAXSMALYVCQEMNVAEAKIQSSDALMDLNMGHWEGCITSEIYTPEVLSLRERYQHDFSAPAGESLRQLEFRMIQFLNGKVLGLPEKFRTEFFLPQNESRRSTSHRHPFSKLLSSWNTQEKIWLDPAKNCVRIDPT

SEQ ID NO: 117327 - protein, 198 aa, Gossypium hirsutum
  unsure (1)..(198): unsure at all Xaa locations
  Clone ID: AI728973.1.pep
GSLCEVKEMDAQKGDSENIGRAEDGDADDKMLRFASAEACAMALSKAAAAVASGDSDVNDAVSEAGLIILPHPLEADKEEKVENIDTLEADPEPEEGPVKWPTKPGIPRSDFFDPKDSWFDAPPEGFSLTLSTFATMWNALFEWITSSSLAYIYGRDETFHEEYLSVNGREYPXKIVLPDGRSSEIKETLAGCISRAL

SEQ ID NO: 117328 - protein, 197 aa, Gossypium hirsutum
  Clone ID: AI728970.1.pep
GTFGQVTKCWVPETSSFVAVKIIKNQPAYYQQALVEVSVLTTLKKKYDPEDEHHIVRIYDYFVYQHHLCICFELLDTNLYELIKINHFRGLSLSIIQLFSKQILRGLTLLKDAGIIHCDLKPENILLCTSVKPAEIKIIDFGSACMEDWTVYSYIQSRYYRSPEVLLGYQYTTPIDMWSFGCIVAELFLGLPLFPGA

SEQ ID NO: 117329 - protein, 206 aa, Gossypium hirsutum
  unsure (1)..(206): unsure at all Xaa locations
  Clone ID: AI728953.1.pep
SNSKTSSMKQKAAKVVSSSLKKSNNKSKKEFKNSKYIKSTKVSPISGDGHKKWSTLVHNGVIFPPPYKPHGIKLLYDGRPIDLTPEQEEVATMFAVMKDTDHMIKAQFMKNFWEDWTKLLGRNHTMNDLDNCYLPPIXQWLLHDNDNKNLLISDDKNASKEYTSNLDEXYMWAIVDPVQDNVGYLIVDPAGLFRGSGRPTLDGIFD

SEQ ID NO: 117330 - protein, 99 aa, Gossypium hirsutum
  Clone ID: AI728935.1.pep
RDMVNSYQFPDNMFFALFTEMAKRVWLLHCLAFAFEPEASIFQISKGCRFSEVYMESVAEEAFLSSESEPRVAFTVVPGFRIHKTVIQAQVYLFQLKTR

SEQ ID NO: 117331 - protein, 203 aa, Gossypium hirsutum
  Clone ID: AI728928.1.pep
ANCSQENMGFWIRRFVSDQALTMAFSILHSFILLAQAITLSTCIVAHNNALFALLVSNNFAEIKSNVFKRFSRDNIHSLAYSDSVERFHISACLLFVLAQNILEAEGPWFESFLFNAFVVFVCEMLIDIIKHSFLAKFNDIKPIAYSEFLEDLCKQTLNIQTEDCKKNLTFVPLAPACVVIRVLTPVYAAHLPCSPLAWRFFR

SEQ ID NO: 117332 - protein, 182 aa, Gossypium hirsutum
  Clone ID: AI728923.1.pep
MASTSTLQAPYSLSLKPQNVTHLLHGSRAATTRARSRRRTYSGAGVFAATTGPSKPQRPPPGVDTRIHWDNEDEGWIGESSNSRQTKEKLNPEEEQKSLLGEKFADLLNDSSDSHYQFLGVSAEADLEEIKAAYRRLSKEYHPDTTSLPLKAASEKFMKLREVYNVLTNGKNRSFYDWTLAQ

SEQ ID NO: 117333 - protein, 113 aa, Gossypium hirsutum
  unsure (1)..(113): unsure at all Xaa locations
  Clone ID: AI728915.1.pep
IAVATTLEQAGCCITCITSGLQSVKPGTFDSVGTTKLQDAGKAGLVMTIQGKNSAVLGSALICSYLFIXFVPDQAEKLLQMSLARSPLQNEPVLNFTQLTSKSVQNESLSLPQ

SEQ ID NO: 117334 - protein, 82 aa, Gossypium hirsutum
  Clone ID: AI728876.1.pep
QRPDMGHAVNVLAPLVEKWKPLDDDSDEYCGIDYSLPLNQMVKGWQEAEGKEFSYMDLEDSKGSIPARPTGFADSFTSADGR

SEQ ID NO: 117335 - protein, 72 aa, Gossypium hirsutum
  unsure (1)..(72): unsure at all Xaa locations
  Clone ID: AI728870.1.pep
MGESRSIGFFFLLLIFSTCFGDQTLDKITELPGQPKNVGFNQYSGYVTVNQQAGKALFYWLIESPLSRXTES

SEQ ID NO: 117336 - protein, 183 aa, Gossypium hirsutum
  Clone ID: AI728852.1.pep
SINTHGLYVILGNMHKLKTITISHANLTGSLPRHLHLNLTHIDLSNNKLKGKIPTSLTLLEDLEFLNLSSNGLNGVIPTEFGDLISLKNISLASNSFSGPIPDSLSAIPGLVHVDLSNNQLNGTVPRFFSKLKELKVLNLENNKLHGVLPFNASFIKRLDVLKVGGNGNLCYNHSVLSSKIKL

SEQ ID NO: 117337 - protein, 164 aa, Gossypium hirsutum
  Clone ID: AI728788.1.pep
MNRTHSPIPTVKSPFHFVLSPNFKSLIHPTATRILNFPPKHPNRLPLLSYCSKSPNFRFISKKRNFEVKASTGSNNGEAGNWVRWLPTGGLAADKVLRLISTATSSPICQFISSPTTFLHSVDPRIKLVWLLALVVLPARAQIAVRFGLVAYIALLSMLFLPKN

SEQ ID NO: 117338 - protein, 175 aa, Gossypium hirsutum
  unsure (1)..(175): unsure at all Xaa locations
  Clone ID: AI728777.1.pep
MGKNDFLTPKAIANRIKAKGLQKLRWYCQMCQKQCRDENGFKCHCMSESHQRQMQIFGQNPDRVVSGYSEEFERNFLDLMKRSHRFSRVAATVVYNEFINDRHHVHMNSTQWATLTEFVKYLGRTXKCKVDETPKGWFITYIDRDSKTLFKEKMKNKRIKLDMVEEEKHEREIQN

SEQ ID NO: 117339 - protein, 97 aa, Gossypium hirsutum
  Clone ID: AI728757.1.pep
AASTEKPVYGRSWKASELRVKSWDDLHKLWYVLLKEKNMLMTQRQMLHAQNLRFPNPERIPKVRKSMCRIKQVLTEREIEDPDPRRSAEMKRMINAL

SEQ ID NO: 117340 - protein, 116 aa, Gossypium hirsutum
  Clone ID: AI728747.1.pep
VFSLKADSVVLGDDRSTSAWESPLFNQSALSSLFILKGVLPKYFSSEWSVAQFRLPEGSRCIVAFGQQKNTIMIIGMDGSFRRCQFDPVNGGQMTQMEEHNFLKQEEHFPSWNEDS

SEQ ID NO: 117341 - protein, 167 aa, Gossypium hirsutum
  unsure (1)..(167): unsure at all Xaa locations
  Clone ID: AI728744.1.pep
MEGVGSNLKVVHSSRRIRYCDGLLRVLGLLLTLVPAILTGAHKETKTIPISITKTLPTLHVPVTAKWHYMSAFVYFFVSNAIAFSYAAASLVASMAVRTSKDKTGLVVVILDMAIMGLLLSVNGAAIAVGILGQYGNSHVXWRKVCNSFGGFCHQMTAAITLSLVGS

SEQ ID NO: 117342 - protein, 177 aa, Gossypium hirsutum
  unsure (1)..(177): unsure at all Xaa locations
  Clone ID: AI728733.1.pep
ALWSLGIVEQLDYLGLGIAYYLQYTLVLVVLSGLLVLGIYHILIQRFKIEYFRRVTAVGYSCVVFGWMTILSVKQPSSKLDLFGLISLPISFAPFESLIFTSIIVPQASFLGHLSGIIVGYAIXWGLIHGMTNYWAVSMLGWIVLVFVFSLKRSGAYDFNFLEIESVTDPSLPSVRF

SEQ ID NO: 117343 - protein, 162 aa, Gossypium hirsutum
  unsure (1)..(162): unsure at all Xaa locations
  Clone ID: AI728722.1.pep
ITGVITKVGSNVKNFKLGDRVGVGCLAXSCLECEFCKNSQENYCDQIQFTYNGIFWDGSITYGGYSEMLVADHRYVVHVPDNLPMDAXAPLLCAGITVFSPMKDCQLLESPRKKLGIXGLGGLGHVAVKMAKAFGXKLTVIRTSPSKKXKAKRRLGADYFPI

SEQ ID NO: 117344 - protein, 38 aa, Gossypium hirsutum
  Clone ID: AI728711.1.pep
GVHSPQNQLLGFSCVSSNGKGNWEFWSTKELDPHSLRE

SEQ ID NO: 117345 - protein, 212 aa, Gossypium hirsutum
  unsure (1)..(212): unsure at all Xaa locations
  Clone ID: AI728704.1.pep
RYDGIYRXEKCWRKVGIQGFKVCRYLFVRCDNEPPPWTSDDHGDLPRPLPAIPELKKATDVFERKESPSWDFDEEDNRWRWKKPPPPSKKPVNAADLEERKRARKAIRQAHTTTVRERLLKEFSCLICRQVMNLPVTTPCAHNFCKSCFEAAFSGKTAIRERSKGGRTLKSQKNVLHCPSCPTDISDFLQNLQVNRELMGVIXSLKQKSEEN

SEQ ID NO: 117346 - protein, 174 aa, Gossypium hirsutum
  Clone ID: AI728681.1.pep
MSHITALPSFEIVCSAHKVGRKGKKTAPKTKPSKDTMGFSSGRKEIWRCVENCGACCKLAKGPAFATPEEIFSDPSDIELYRSLIGPDGWCIHYEKNTRTCSIYPDRPYFCRVEPDIFKKLYGIENRKFNKEACSCCRDTIKAIYGPNSKELKNFNTSINDSSSALSTGVYHCC

SEQ ID NO: 117347 - protein, 179 aa, Gossypium hirsutum
  Clone ID: AI728675.1.pep
MAGCQLVGNSVFYGTERRNCHCQLVKFSGVPLFYPLLSVPLTNISASLSNEGPPDGYRKNVGICLVNPSKKIFTASRIYIPDTWQMPQGGANKGEDLRKAAMRELREETGVTSAEFLAEAPYWLTYDFPIKVKDKLNRTWGTNYKGLAHKWFLFKFTGNEEEINLLCDGSEKPKFIKWS

SEQ ID NO: 117348 - protein, 145 aa, Gossypium hirsutum
  unsure (1)..(145): unsure at all Xaa locations
  Clone ID: AI728672.1.pep
FFTELRRQLVCFLLCWFSQDFRHEVNLLVKLRHPNIVQFLGAVTDKKPLMLITEYLKGGDLHQYLKEKGSLXASTAVSFALDIARGMAYLHNEPNVIIHRDLKPRNVLLVNSSADHLKVGDFGLSKLIKVQNCHDVYKMTGETGS

SEQ ID NO: 117349 - protein, 206 aa, Gossypium hirsutum
  Clone ID: AI728666.1.pep
QTQSMATRNSGGSGLGLAICKRFVNLMEGHIWIESDGLGKGCTAIFMVKLGIPERLNEPKLPFMPKVPTNHGPTAFPGLKVLVMDENGVSRMVTKGLLVHLGCDVTMVSSSEECLHVVSHEHKVVFMDVCVPGMDGYEVAIRINEKFTKRHERPIIVALTGNTDKVTKENCMRLGMDGVILKPVSLDKMRSVLTDLLEHRVLFEAI

SEQ ID NO: 117350 - protein, 182 aa, Gossypium hirsutum
  Clone ID: AI728665.1.pep
YYTPGGKRGTGTRPDQERKKGVPWTEEEHRQFLMGLKKYGKGDWRNISRNFVTTKTPTQVASHAQKYFIRQVTGGKDKRRSSIHDITTVNIPDTISSSPDQSKPLSPSNSSTVMQPQQQPKATSVTKEVLDFEWNQRNEGAAIIFDQTSSGNALLSPYCGMISSYGPQFGSYNALFQSMQHP

SEQ ID NO: 117351 - protein, 148 aa, Gossypium hirsutum
  Clone ID: AI728664.1.pep
MEISYNPSIGLQSHQSLIIATIVTLLPLLLAVRSLLFRRPHKPNVSPPAPSAGKEETKQATPSCSCNGTSGSEAFLNGDKAAPAEEDMVTADVSKVAEKQNGASMMEQLVPEITTHALSYLDYPSLCRLSMTNSLMRKAANDDNAWKA

SEQ ID NO: 117352 - protein, 198 aa, Gossypium hirsutum
  unsure (1)..(198): unsure at all Xaa locations
  Clone ID: AI728656.1.pep
MSSDGNVNGGAGANSLVTNKPFFCYQCNRTVTVTIASSDPSCPICQGGFLEKYENPIPNQASNFRNPNPVSHSSSSLSDPFSSILPLLTAMNSSPSPAYVDLESTGLFESTVTTRADPFAFDPFTFIRNHLSDLRSSGAQIEFVIQNSPSESGFRLPANLGDYFIGPGLKQLNQQLTQNYPKRXRNPPTSKXVIHSLL

SEQ ID NO: 117353 - protein, 203 aa, Gossypium hirsutum
  unsure (1)..(203): unsure at all Xaa locations
  Clone ID: AI728644.1.pep
MGDCMRNCKRSAEAAEMEASSTSFSLSKRRKTVGSRELQELELTSPDIELGTTRILSNSLNKPIYLATSSGSCGVLSGDMCSGLFSGNSSASRCSSNESCDILKDSLRFVDLEAKSFETEISTCTNVNKFSRETPPLSEHCGDSDEMQSPEKKPPPSTTKPPKIPSXAEIDEFFSVAEKYEQXRFAEKYXYDIVXDVPLDGRY

SEQ ID NO: 117354 - protein, 127 aa, Gossypium hirsutum
  Clone ID: AI728643.1.pep
ELKAGFPKLGTKLSENEVRQLMEAADVDGNGAIDYIEFITATMHMNRMEREDHLYTAFQYFDKDNSGYITMEELEQALKKYNMGDEKTIKEIIAEVDTDRDGRINYDEFVAMMRKGNPELANNRRRK

SEQ ID NO: 117355 - protein, 62 aa, Gossypium hirsutum
  Clone ID: AI728640.1.pep
MLDHMHMHELPIMENSLPRNSLIGALHLQKLQARLPEARVIYCSATGASKPHNIGYMIRLGL

SEQ ID NO: 117356 - protein, 85 aa, Gossypium hirsutum
  Clone ID: AI728637.1.pep
SSKSEKKAINILTKTQVDVELSKMKTMTAEEAAAAAARAVAEAEFAIAEAEKAAREAGAAEAEAEAAKIFAKAAAKALKSRMLVT

SEQ ID NO: 117357 - protein, 192 aa, Gossypium hirsutum
  unsure (1)..(192): unsure at all Xaa locations
  Clone ID: AI728636.1.pep
MILATNLCFRTIPTTCTTVKQQKDPPHQLNPVIPTKTKACECFDLHKELIPYEKAWSWQKQIVKQKKSLLQEHEDCPDTLIVLQHNPVYTMGTGSSENYLNFDVKEAPFDVYRTERGGEVTYHGPGQLVMYPIINLRNHKMDLHWYLRTLEEVVIRVXSSTFSIXASRIEGVXGVWIGXQKLAAIGVRGIHW

SEQ ID NO: 117358 - protein, 109 aa, Gossypium hirsutum
  unsure (1)..(109): unsure at all Xaa locations
  Clone ID: AI728630.1.pep
MVDEIGEEEFYSIEESIEGERCFDLDYEFDAPRCFDFNHLETDCEAKEAELWFXSAGNYPPSPFVIKLKWRYDMNGDGEFGDDSTDCDELMEKHVIPFAKVIPTAKTNP

SEQ ID NO: 117359 - protein, 169 aa, Gossypium hirsutum
  Clone ID: AI728625.1.pep
MEMAATTVQPCPSSFIFFTQRQKTRLHNIIHFPFLLLPPSHLRRRFSSSAARDINSRKRRRKWDSNAETIRAKDFTFNTQNNEDEDDDEEEDYDGETASSGILEEAIDSIWILKAFKSFGWGLPAILLSLLFANGPKAFLMALALTIGQSALAFAFEKFPGKVTSKQKR

SEQ ID NO: 117360 - protein, 223 aa, Gossypium hirsutum
  unsure (1)..(223): unsure at all Xaa locations
  Clone ID: AI728600.1.pep
QAVEASTALARIQRVADERTTKAAEFEQKLALLEVECASLNQELQNLEARARRGQKKSPEEANQMVQMQAWQEEVKRARRGQRDAESKLSLLEAELQKMRVEMAAMKRDAEHYSRQEHMELEKRYRELTDLLYNKQTQLETMASEKAAAEFQLEKEIKRLQEAQVEVXRNKVPRRASMSWEEDTEIKALEPLPLHHRHMAVASIQLQKVVKLLDSXSVRAXKF

SEQ ID NO: 117361 - protein, 183 aa, Gossypium hirsutum
  unsure (1)..(183): unsure at all Xaa locations
  Clone ID: AI728585.1.pep
IPAAEVPNSDNAPGSSNDNEEAEGHSIYVRNLPYNATPQQLEEAFRKFGTIKCNGIQVRSNKQGFTFGFVEFENPSSVQSALEASPITIGDRQVAVEEKRTNTRVVRSSGRPRYNSSGKGGLRGDSFRARRNFGIGRGGYGRHEIKHPGDFSGTTEGSGGWNGNNNXERNKQNGRGSHQGWAK

SEQ ID NO: 117362 - protein, 123 aa, Gossypium hirsutum
  unsure (1)..(123): unsure at all Xaa locations
  Clone ID: AI728582.1.pep
MPLTVATRPPSGLHLSIHPEEYSVHGXPTHGLCAYGLSEDXYPLRCASSLLGPILDGGXKMILGNSRRISPVEYTQPWSSLNXAETQSQEPADADKLEKMSTDSDKYSIMRHVRAHRVPAPCE

SEQ ID NO: 117363 - protein, 206 aa, Gossypium hirsutum
  Clone ID: AI728577.1.pep
MKGGKIEEIEGKKYDHGFSSAEVNTLAAIAEALFPSLPPSSCCFERRENHTISKAVRSFMETSASQSPFPDEAAEMLWKRLFIECVVVVRVVSLSSSAKVGTLLLCGSHCWGKEWPYINGFTSMPLAQRDQVLQAWFKHRFFTPFRVAFLYFKVAILFIIFSRVDDNGENPAWEAIGYNIHTLDDVPNERPLQLRIVETIPCYRLH

SEQ ID NO: 117364 - protein, 122 aa, Gossypium hirsutum
  unsure (1)..(122): unsure at all Xaa locations
  Clone ID: AI728494.1.pep
MSIGKTIVWFRRDLRIEDNPALXAAARDGXVFPVYIWCPEEERQFYPGRVSRWWLKQSLSHLEQSLKSLGAELVMIKTQSTLSALLDCIKATEATRVVVNRLYDPVSLVRYHSIEEKLTDVG

SEQ ID NO: 117365 - protein, 214 aa, Gossypium hirsutum
  unsure (1)..(214): unsure at all Xaa locations
  Clone ID: AI728491.1.pep
AMFAASFRANSKQLQAQNHALPIGDAPLAVAGSEVPAEKAEESQNLKSQDGVNSVLSKFLDLNIDENWEHVGEDKKGEMIISLLHQIKDLEKQVKERKEWAHXKAMQAARKLSSDLTELKMLRMEREEMMXKKKGKHXIEDSTMKRLSEMENALKKASGQVDRANAAVRRLETKNAEIRAEMEASKLSASESVTTCLEVAKREKKCLKKLLAWD

SEQ ID NO: 117366 - protein, 212 aa, Gossypium hirsutum
  unsure (1)..(212): unsure at all Xaa locations
  Clone ID: AI728489.1.pep
KKERVAVKAFGSDGLYYKLSAIMNMTSDRTKVIHLQPYMLFINRIGLSLCLRQCDSHTVEWIHPTDPPKPIGWQGSSKLELLKLYVNGYDWSTPFSVSNEGVMRVSLKNGNGSDQLFFKVEVRSGTKSSRYEVIFRPNSSSSPYRIENRSIFLPIRCRQVDGTSDSWHFLLPNTAVSFLWEDLGRQHLLEILVDGTEPSRSXKYDIDEIADH

SEQ ID NO: 117367 - protein, 187 aa, Gossypium hirsutum
  unsure (1)..(187): unsure at all Xaa locations
  Clone ID: AI728454.1.pep
MAASDVVVVMDFDKTIIDCDSDNWVVDELGATELFNQLLPTMPWNSLMDRMMKELHSQGTKIEDIVAVLKRTPIHSRIIQAIKSAYALGCDMKIVSDANVFFIDTILKHHGLKECFSEINTNPSFVDEEGRLRIFPYHDFSEHPHGCPHPCPPNMCKGIVIERIQASXSAMEEKITIIYMGDGLGDF

SEQ ID NO: 117368 - protein, 119 aa, Gossypium hirsutum
  Clone ID: AI728402.1.pep
DLEANVYNFGLLLLEIISGKLPCSEEQGPIEKWADQYLSDKSNFGSMTDHTLDSFKIEELEIICEVIKECIATDPRKRPTMKDIITKLREVIQVAPEQATPRLSPLWWAELEILSMEAT

SEQ ID NO: 117369 - protein, 194 aa, Gossypium hirsutum
  unsure (1)..(194): unsure at all Xaa locations
  Clone ID: AI728387.1.pep
NTFLYKVVLLKIIHESSVLHSETLAILKWKAFLHSQNHSVSLSCITSNKPDTITSPCGWSGIHCNQTHPVIEINLPGVCLXRTLQLFPFLSLPNLVHLDPTTHELYGIIPPTISHLSGVTYLDLSFIQFSGQIPPEIXPVSVLLIRHLAEKQFNGSIPRNIGPLXFHTDLALCSNKLHGWTPASLGEGSRLVSL

SEQ ID NO: 117370 - protein, 202 aa, Gossypium hirsutum
  unsure (1)..(202): unsure at all Xaa locations
  Clone ID: AI728383.1.pep
TAEAMGAERDHLTSVISSAVNVRSAGDIMTLTAGAATALRGAATLKARALKEVWNIXAVIPVENNKNGGNGSNSSSNGSFSGELLPEENFLGICSRELLARGCELLKRTRKGDLHWKVVSVYINRMNXVMLKMKNRHVAGTITKKKKNVVLEVIKDMPAWPGRHLLEGGENRRYFGLKTVMRGVVKFECKNQKEYDLDSRCI

SEQ ID NO: 117371 - protein, 75 aa, Gossypium hirsutum
  Clone ID: AI728376.1.pep
VWIRLRALLEGMYTRSLLKFIGGAIGPVVKIDRNKTSKFRGQFSRIAVYIDLGKLLISKLQIDGRIQRVEYESMS

SEQ ID NO: 117372 - protein, 41 aa, Gossypium hirsutum
  Clone ID: AI728355.1.pep
RWLCLQILSIACLIITIAAAAGSIAGVILDLKSYTPFSTAY

SEQ ID NO: 117373 - protein, 174 aa, Gossypium hirsutum
  Clone ID: AI728348.1.pep
TCESLYMGVPCVTMAGSVHAHNVGVSLLSKVGLQHLIARNEDEYVQLALKLASDITALQNLRTSLRDLMSKSPVCDGQNFISGLEATYRNIWRRYCKGDVPSLRYMETLQKQDIPDELTTKTSDPEKITVSGDTFPSTVKCNGFNQVPLPISNNTTSEENGDESNQTTNSSKPS

SEQ ID NO: 117374 - protein, 98 aa, Gossypium hirsutum
  Clone ID: AI728339.1.pep
FLVHIFLYTHFVCISKSSIFVSFSGTWLNFCCCCCCYTIKKFFLLILKKMQRNKFTTMRSLKVLDKCKGAQFYALHTTGGGGGDVGDKLYHQLQDHLI

SEQ ID NO: 117375 - protein, 189 aa, Gossypium hirsutum
  unsure (1)..(189): unsure at all Xaa locations
  Clone ID: AI728338.1.pep
ACKKRLFPNINRCGIYVCFTTGCSITGNPKSSPWLTFSELSKTNGALVTEFYNGGYLNTITPTPLSISSTCLPPWRPGLKEVFDAIICDPPYGVRAGGRKSGGRKLLKGVIGPYTVPNDKRADHIPSTAPYSLXECVHDLLDLAARMLVIGGRLVFFYPVSREEDSCEDHFPEHPCFELVATSKQILSS

SEQ ID NO: 117376 - protein, 110 aa, Gossypium hirsutum
  unsure (1)..(110): unsure at all Xaa locations
  Clone ID: AI728335.1.pep
FPRSVERDGGFLAIFWSENASGLFISKADDFFTMPFSVPNSAQFLPPLRLSNSSILRYISLRRCCESRVFRVCCQGGNVDVIXRNESDAASSGGTENQLTCVTEFGGSSP

SEQ ID NO: 117377 - protein, 139 aa, Gossypium hirsutum
  unsure (1)..(139): unsure at all Xaa locations
  Clone ID: AI728318.1.pep
NLSIPSEETGDAKWIFVLSTSKILYVGVKKKGTFQHSSFLAGGATIAAGRLVVGNGILKAVWPHSGHYRPLEENFNDFISFLRENNVNLNNVKMTPVDEEGNLADKQRSNNHLRCNSSEDDFNFEADEISVXDSIDQIR

SEQ ID NO: 117378 - protein, 144 aa, Gossypium hirsutum
  unsure (1)..(144): unsure at all Xaa locations
  Clone ID: AI728310.1.pep
MALPLGKLSILVGAGIVGSILAKEGHMPNLSDFVSGAFKFAFRQLKHDDSTPSGNKPRNDYLMAQVNXLRQELQILXSNGPVTIVTGHGSGSXKYRIIIVVVVXGYGYVWWKGWKLPDLMFATRRXLSDARDAIAKQLDSVYSS

SEQ ID NO: 117379 - protein, 112 aa, Gossypium hirsutum
  unsure (1)..(112): unsure at all Xaa locations
  Clone ID: AI728308.1.pep
MAGNDWINSYLEAILDVGPNLNDAKSSLLLRERGRFXPTRYFVEEVITGFDETDLHRSWVKAQXTKSPQERNTKLENMCWRIWNLARQKKQVLWFISFFLDGLLFLFTMFGL

SEQ ID NO: 117380 - protein, 121 aa, Gossypium hirsutum
  Clone ID: AI728293.1.pep
SEQICNCAVEMANNLGVDAIFVYTKHGQMASLFFCNRPYLPIFAFTSDNGTRMALNLQWGVIPLLVELSDDDMEANISATIELIRRKGMLKPGDVVMVVSDLTPTHINSTAFQSIQVKTVV

SEQ ID NO: 117381 - protein, 85 aa, Gossypium hirsutum
  Clone ID: AI728291.1.pep
SQPRNPSTSLPCREKLRKDMLHDPSMEIGATPEPESPPTPYKSAILVDPVREVTHLPHHTPLMKDSPSTLRDRIKEFRADNTYLR

SEQ ID NO: 117382 - protein, 191 aa, Gossypium hirsutum
  Clone ID: AI728281.1.pep
VIAQVQPEFTPIHPSKVADPRPGPAKSSQDGLPDSSSFQHLHVPVQMMEDFLRLALANTEKNLETCGVLAGSLKKRVFHITALIIPKQESTSDSCSTLNEEEIFEVQDKLSLFPLGWIHFFGFQTHPTQTCFMSSVDLHTHYSYQIMLPEAIAIVMAPTDTSSPHGIFHLSDPGGVSIIRNCQQRGFHPHE

SEQ ID NO: 117383 - protein, 190 aa, Gossypium hirsutum
  Clone ID: AI728279.1.pep
MKTPPFPSNSLKHPYIRNSYNHLPSRRLALFQLGSVSAIPQSEFFGSIVSGKSENTATAIKEQDALNWVKNDNRRMLHVVYRVGDLEKTIKFYTECLGMKLSRKRDIPEEQYSNAFLGYGPEDSHFAVELTYNYGVDKYDIGNGFGHFGVAVNDVSKTVDLVKAKVGKVTRDPGPVKGGTKIIAFIEDPD

SEQ ID NO: 117384 - protein, 192 aa, Gossypium hirsutum
  unsure (1)..(192): unsure at all Xaa locations
  Clone ID: AI728278.1.pep
DSALRFHLHDGDETDGYERSDDEEDSSDNKLQWGESACCSMKKAFSSTVFIIRELHSYTLQMRESLLCEDLQGIFIRVQNEIHASFLWLFQQVFSHTPTLMIYVMILLANFSVHSMGNNAALAAETAVNPMMGSYSYVSSXEVRGKEQTKYDSLQLQNGKTGRGKGGGGKXKPVACGGDEWFDETEWEPSEE

SEQ ID NO: 117385 - protein, 191 aa, Gossypium hirsutum
  Clone ID: AI728275.1.pep
SRVLQIDMSPWTIIDQPRFSYRGLLIDTSRHYLPVPVIKKVIDSMSYAKLNVMHWHIVDTQSFPLEIPSYPKLWDGAYSPSERYTVADAADIVSYAQKRGINVLAEIDVPGHALSWGTGYPSLWPSKDCQQPLDVSNEFTFKVIDGILSDFSKIFNFKFVHLGGDEVNTSCWTTTPRIRNWLKKRGMNESQ

SEQ ID NO: 117386 - protein, 182 aa, Gossypium hirsutum
  unsure (1)..(182): unsure at all Xaa locations
  Clone ID: AI728256.1.pep
VFNGTTNFGTLVGAFLCDTYFGXYKTLGFATAASFLVINSXHRSPPILRYSTDFDIIFWLFFSTFLFMKGLLAIQLTAAIPELHPHRCAAKESGECEGPTTGQLAFLLMGLGLMIVGAGGVRPCNLAFGVDQFNPKTEAGKRGIDSFFNWYFFTFTFAQMVSLTLIVYIQSNVSWAIGLGIP

SEQ ID NO: 117387 - protein, 166 aa, Gossypium hirsutum
  unsure (1)..(166): unsure at all Xaa locations
  Clone ID: AI728232.1.pep
MAGSGAGEGPTLIKQLAACDKSSRDRAVRSLLDGWLPSQSEFSDEEMKRLWKGLFYCVWHADKLPAQTDLINKLSSVLPKLEPGLSLQYFSVFLLTMRREWTGIDKLRLXKFYLLIRRFLNCFFVMLKKSSWDLDFMRRSIRVLVDGTFIADDKFQGNGVNYHIAS

SEQ ID NO: 117388 - protein, 213 aa, Gossypium hirsutum
  unsure (1)..(213): unsure at all Xaa locations
  Clone ID: AI728222.1.pep
VSLKKTRKIDELSVPPAPSLYQMNAASRNSLLMDEYSDEDEEQMLEAEQEPYPTRSDYHVKRTALEEEPIEKIDLSCFSGNLRRDDRDNSRDCWRISDGNNFRVRSKHFCYNKTKIPAGKHLMDLVAVDWFKDSKRMDHVARRQGCXEKGFFSLIFNFQVPGSTHYSMVFYFVTKELXPGSLLXRFVDGDDEFRNXRLKLIPSLPKGSWIVRQ

SEQ ID NO: 117389 - protein, 170 aa, Gossypium hirsutum
  unsure (1)..(170): unsure at all Xaa locations
  Clone ID: AI728214.1.pep
MGGRFTWAPPLCRSNTPKPDSAMAPPQSGYSRIYKCSNVCVTHGMHLFILPPYPHLLTTNDARPYAPVLDRTILTGNSHPLFLRTLTLGGLEPMLDLNSYYLGINPHPSILPSCLPASCCFLHLAHDLRVPXVSVKMLKSPSTIIGSTMVIVRVMGITPYKSPIHPFHLV

SEQ ID NO: 117390 - protein, 90 aa, Gossypium hirsutum
  Clone ID: AI728176.1.pep
VGNKADMDESKRAVPTSKGQALADEYGIKFFETSAKTNLNVEEVFFSIARDIKQRLADTDSKSEPQTIKINQGDQAAGGAAPAQKSACCG

SEQ ID NO: 117391 - protein, 168 aa, Gossypium hirsutum
  Clone ID: AI728157.1.pep
MPVFKTPFNGYSVRFSPFYESRLAVATAQNFGILGNGRVHVIDLSPNAPVINELIAYDTADGVYDVAWSESHDSVLVAAVADGSIKVYDTALPPHSNPLRSLKEHAREVHGLDYNPTRRDSFLSASWDDSVKLWTLDRPASLRTFREHAYCVYSVAWNPKHADVFASA

SEQ ID NO: 117392 - protein, 116 aa, Gossypium hirsutum
  Clone ID: AI728156.1.pep
YALTLSPVAMSLEELLPPRHLKSHVYPMLIRTALVVSTLLVGLSVPFFGLVLSLIGSLLTMLVTLILPPACYLSILRGKVGCIQATICIIIIAVGAVSSAFGTYSALTKIIQNLSS

SEQ ID NO: 117393 - protein, 175 aa, Gossypium hirsutum
  Clone ID: AI728154.1.pep
MGEKVTMVLKVDLQCKRCYKKVKQVLCKFPQIQDQIYDEKANTVTIKVVCCDPKKLRGKIRCKGGYSIKCIEIKPPPKSDKDNPGKTEPKPTDTPEPAKPPEKQASPTVLALFPGGFCCKDCYHGHHGGPCYFGGPPPPPYYWPYGRPVYVNWGGGGGGSTYCYCFEENPQCSVM

SEQ ID NO: 117394 - protein, 147 aa, Gossypium hirsutum
  Clone ID: AI728152.1.pep
MEEQVDYDHRSIMVEGGMQIDPRRERFPYCIVWTPLPITSWLIPFIGHIGICREDGVILNFAGPSCVSIDDFAFGAVARYIQINKDKECSISYHSSALKGDQEYQHDDLREALTWDDALKKGIQEFQHRPYNLFTCNCHSFVVNNLN

SEQ ID NO: 117395 - protein, 116 aa, Gossypium hirsutum
  unsure (1)..(116): unsure at all Xaa locations
  Clone ID: AI728148.1.pep
MLSDAESVTEEQVDEVLKQFLKXFKEGSLKDQGWPIYFSAYTLSKAAMNAYTRIVANKYPSFLVNSIGPGFVKTDITCNTGVLTAAEGAENVARLALLSNDGPSGHFFLRKEVSSF

SEQ ID NO: 117396 - protein, 193 aa, Gossypium hirsutum
  unsure (1)..(193): unsure at all Xaa locations
  Clone ID: AI728137.1.pep
PNILYHLSLENVEQRKLEGALYYAKSLLKLEGGFNIQGWLLLGRVLSAQKRFVDSETILNASLDQTGKWDQRELLHTKVKIQLAQGQLRNAFDTYTELLGILHVQNKSFGSGKKLHKDCGCYSKSFEQEIWHDLXYLYISLSRWKDAEICLSKSNAISSFSAVRNHATGLLYERKXLLKEALKAFQNALGIDL

SEQ ID NO: 117397 - protein, 129 aa, Gossypium hirsutum
  Clone ID: AI728115.1.pep
MQKPPQSIDFALKETSPKIGAGAVTGDKLSSTYDLVEQMQYLYVRVVKAKDLPGKDVTGGCDPYVEVKLGNYKGVTKHFEKKNNPEWNQVFAFSKERIQASVLEVYVKDKDVVADDLIGRALFDLNEIP

SEQ ID NO: 117398 - protein, 181 aa, Gossypium hirsutum
  unsure (1)..(181): unsure at all Xaa locations
  Clone ID: AI728111.1.pep
MQPKRKLLVIIESDQGSYTAEEREAARKECFEAAGMGENGNGNVNEMENGGDDEDKEDPLSDEQYGYPKAESNKWVSCIXILDPRTATTTCLLELQDSEAAFSVCTVNFHDKEYGALLAVGTAKGLQFWPKNSLFAGFIHIYRFLEDGRSLQLLHKTQVEGVPLALCHFQGRLLAGIGSVL

SEQ ID NO: 117399 - protein, 184 aa, Gossypium hirsutum
  Clone ID: AI728103.1.pep
VTSASRNSMEVDEVSTSFPQTLKMENAEANPVKSHGDFQVSSRDHRVSSHSAPIFPERKLDPAERVKQMRQSSTRTSNTYVLPTPNDSTCAVSSRTNSSISHTKPTNVAGHPHNTWHSSPLEQKNREKDSGDGQPSEFTILNSESGLKENSSSNSTSTQLPPPLSEGRESTQLDSTEAKKIKRK

SEQ ID NO: 117400 - protein, 176 aa, Gossypium hirsutum
  Clone ID: AI728092.1.pep
VVCPLCKVDPEDSSHLMWSCGTLQSVWASLQIKIPSFDELSCCKHRFLHTFSTADDQQRQVMAISLWSLWFRRNKLIHEGVKLSFQELLRFIRGYVQDLNLNQESLRPSLRSMVKEFWQPPDCGVIKLNFDASFQNEFRIATIAVLARDWAGELIGTFRAGRPEATNLWCLVRWSS

SEQ ID NO: 117401 - protein, 187 aa, Gossypium hirsutum
  unsure (1)..(187): unsure at all Xaa locations
  Clone ID: AI728072.1.pep
GESQFAFTSICDFIHNFFICEECRQHFYEMCSRVTSPFKKSRDFALWLWSAHNEINDRLMKEEASLKTGDPKFPKIIWPPKQLCPSCYHLQGPKDKGTNQIDWDQNEVFKFLMSYYGNTLISLYKGKGVLADDRANATLDDLVTSTNAXVVPIGAAFAIAIAXCMFGALACYWRSRQKSIKARRSWN

SEQ ID NO: 117402 - protein, 205 aa, Gossypium hirsutum
  Clone ID: AI727991.1.pep
LKKADIGVAMGSGTAVAKSASDMVLADDNFATIVAAVAEGRAIYNNTKQFIRYMISSNIGEVVCIFVAAVLGIPDTLAPVQLLWVNLVTDGLPATAIGFNKPDSDVMKAKPRKVSEAVVSGWLFFRYLVIGAYVGLATVAGFIWWFIYSETGPKLPYTELMNFDTCPTRETTYPCSIFEDRHPSTVAMTVLVVVEMFNALNNLSD

SEQ ID NO: 117403 - protein, 188 aa, Gossypium hirsutum
  Clone ID: AI727984.1.pep
MASSSKANLAEQDEGEEAEEIEHFNDFTLASSWERFISEIEATCRQWLADGPKRLLEKGAVHLDSSDNIYKVKSELKNAAKIYSMEYYFEISGKIAHWNCTLHDLQLCFGVKEFLVISPQSASGVVLDAPEATKLLSAVSIALANCSSLWPAFVPVHDPSRKAFIGIQNMGTIFMRRFEADRIGSQVP

SEQ ID NO: 117404 - protein, 149 aa, Gossypium hirsutum
  Clone ID: AI727982.1.pep
MNFMKAFDQTVREIKREVNLKVLKVPEIEQKVLDATDNEPWGPHGAALAEIAQATKKFSDCQMVMNVLWSRLGETGKDWRYVYKALSVIEYLISNGSERAVDDIIGRTFRIASLMSFEYVEPSGKDMGINVRKKAETIVGLLHNKERIQ

SEQ ID NO: 117405 - protein, 207 aa, Gossypium hirsutum
  unsure (1)..(207): unsure at all Xaa locations
  Clone ID: AI727961.1.pep
FHAHKLVLAARSPVFEAEFSDRMEDDNEIVVTDMEPKVFKALLHFIYKDSLIDDEEFVGTSSSSMPSVSDALAAKLLAAADKYDLPRLRLMCESVLCKDISVNSVANILALADRHHAMDLKTVCLKFAAENLVAVMRSDGFEYLKXNCPSLQSELLKTVAGCDEEFXGGGKNRSVWAHLSDGGDTINRSVLQQTWENGREQNQGMWV

SEQ ID NO: 117406 - protein, 179 aa, Gossypium hirsutum
  Clone ID: AI727940.1.pep
VVTFGPSGLTTEVKSVEMHHEALSEALPGDNVGFNVKNVAVKDLKRGFVASNSKDDPAKEAANFTSQVIIMNHPGQIGNGYAPVLDCHTSHIAVKFSEILTKIDRRSGKELEKEPKFLKNGDAGLIKMVPTKPMVVETFSEYPPLGRFAVRDMRQTVAVGVIKNVEKKDPTGAKVTNSA

SEQ ID NO: 117407 - protein, 197 aa, Gossypium hirsutum
  Clone ID: AI728051.1.pep
MSCPTVGATTHITNGVTSVDCQKQVRSWRLLRSLMELLIPSCYCAFIDKHHEIKHQNYLHRYYQPPVSTSSGVITGTIFGYRRGKASFCIQPNIKSNNPILLLEFAVPTAVLAREMQGGILRIALDCTSKGNSSGNPDSVLSMPLWTMYCNGKKVGYAVKRKPSKADMDALRLMNSVVVGTGLISGKELDHHDDELI

SEQ ID NO: 117408 - protein, 203 aa, Gossypium hirsutum
  unsure (1)..(203): unsure at all Xaa locations
  Clone ID: AI728050.1.pep
GTRGNQVPYEKSFWGALKNPMRYLITFMAFSQIGMMVAPSTIASQYVTQAWRGAAILSCVWFFYRWKTNLLARALATHNLXGTDREKLLTLDRVSSIGLFVVGLMALAEACGVAVQSILTVGGIGGVATAFAAKDILGNVLSGLSMQFSKPFSLGDTIKAGSIKGQVXEMGLTNTTLLNSEKFPVLVPNSLFSSQVIVNKSRA

SEQ ID NO: 117409 - protein, 177 aa, Gossypium hirsutum
  unsure (1)..(177): unsure at all Xaa locations
  Clone ID: AI728046.1.pep
MDQLRKDAAFLPSIPSSNPSIIEFRQPPVDPLVPSTTRTQSKSGQRDGEEPKDCVAARKLQKADREKSRRDRLNEHFLELGNALDPDRPKNDKATILTDTIQLLKDLTSQVTKLKGEHAMLTEESREQLTVEKNDLXDEKASLKSEIDDLNIQYQQRVRTMFPWASVNYPVVMAPPS

SEQ ID NO: 117410 - protein, 79 aa, Gossypium hirsutum
  Clone ID: AI728031.1.pep
NRAAGVYDLLCLERTHIITCEHSFKNGYRCILFILHGGYRRFDSSYTVQPPLDLPAAVPCRLSLISFRPLLCLFPLPLS

SEQ ID NO: 117411 - protein, 85 aa, Gossypium hirsutum
  Clone ID: AI728005.1.pep
MKAGPLLQTLLLAGPLPQWRHPPPPLDSFDIPPVTIPSPPPPPPHRLHQDSFTTLNACGKVNRKRILLEGSDSPTETKYQRIVLH

SEQ ID NO: 117412 - protein, 166 aa, Gossypium hirsutum
  unsure (1)..(166): unsure at all Xaa locations
  Clone ID: AI727994.1.pep
SSLSLAEKVPCEVPGCNIEVKNLHPLVQRAIAAASALPDLQELYHRIPKSIESKLLPFQREGVRFVLQHGGRALLXDEMGLGKTLQAIAVAACIRDSWPVLILAPSSLRLHWASMIEQWLNIPPSDIVVVFSQMGGSNRSGFTILSSNSKGDIHLDGLFNIISYDL

SEQ ID NO: 117413 - protein, 54 aa, Gossypium hirsutum
  Clone ID: AI727925.1.pep
YKNGFHCAYQVLRTEGPRGLYKGGFAIFARLGPQTTITFILCEKLRKLAGLNAI

SEQ ID NO: 117414 - protein, 165 aa, Gossypium hirsutum
  unsure (1)..(165): unsure at all Xaa locations
  Clone ID: AI727922.1.pep
RLIRDFKDDVDAKIILAGLSTTCSQKIHNQLVGVERMHKDTKYVLFLDDDVMLHPGSIGALTAEMEKNPEIFIQTGYPLDLPSGSLGSYCIYEYHMPCSMGFATGGKTFFLWGGCMMMHADDFRRDNYGVVSGLQNGGYSDDMTLXAISGTHKMLITSPPCTVFP

SEQ ID NO: 117415 - protein, 128 aa, Gossypium hirsutum
  Clone ID: AI727919.1.pep
KLQLPQRRGRRRKMNLKQRKRIVMSRVTAVEDTSTVRFLAKAEVRVPKKLLQWEKVKGVDKVMFVQTKVRSPPKEKQAREDGCGKCKCLYILSPIGNFCSLHVEKCTIFLKIHWSLYLHFQLKLFSLS

SEQ ID NO: 117416 - protein, 166 aa, Gossypium hirsutum
  unsure (1)..(166): unsure at all Xaa locations
  Clone ID: AI727911.1.pep
NSKVFFFLKWEMEKVFLEAEELPKAILRRVVKEKFFECSPDXEFKVKKEAHLGFTERVWIFIHNLSGTANEICKELKRQTMNGEDVFKEIEEIEFLEFVKPLRGLLAEFRKKNVGKKGGAPKENEVKKKRKIEDLFAKNGTKTKQKKKKKKKKKKKKKKKKKKKKK

SEQ ID NO: 117417 - protein, 188 aa, Gossypium hirsutum
  Clone ID: AI727892.1.pep
EQLDSSASLTTDVDNQNNLTPEAPNANALQKLVKSWENCLTGLEQRFNNAHDFRVALNKFSIAHGFEYTFKTNRSRYIIANCKAEGCPWTIQAARLSTTKLFLIKRMSETHTCGAGNSSSRHPKVSSKLVKFLVKEKLRDSPNAKPREIINEILHDYGFKARYAHVWRGVESAKEKPQVSYDEGYNQI

SEQ ID NO: 117418 - protein, 163 aa, Gossypium hirsutum
  unsure (1)..(163): unsure at all Xaa locations
  Clone ID: AI727891.1.pep
MVAMRRLSVLQSQPGNKTCVDCSQRNPTWASVSYGVFMCLECSGKHRGLGVHISFVRSVTMDSWSEIQIKKMESGGNERLNSFLAQYGIPKETDIVTKYNSNAAGVYRDRIQALXEGRPWQDPALVRETLNGDGSHKKSSLSDSDDCGKGXXYGNDNGGWAXW

SEQ ID NO: 117419 - protein, 224 aa, Gossypium hirsutum
  unsure (1)..(224): unsure at all Xaa locations
  Clone ID: AI727872.1.pep
MASFLKPSPSNFHLTFIPISFSSSSVILSSPLYQTTSLRVRFCALTTDPDGGRTASQESSGADLLRKPSIVPDEESGGISEEEDGXKEKGNKGEWIDWEDRILRDTVPLVGFVRMILHSGKYGSGDRLSPEHEKSILERLLPYHPESEKKIGCGIDYITSCSKTEGVKGQAFKNAGENSLPIKKSCCLVGFQFRLEIFGRFGVCTDGNIPIPPPSPSCFPFCLV

SEQ ID NO: 117420 - protein, 178 aa, Gossypium hirsutum
  unsure (1)..(178): unsure at all Xaa locations
  Clone ID: AI727860.1.pep
GFFLLGSSIHASFIKNPENIYPIEDFKDSNNALVVWNSLLGMYSRCGTLTDLTKLFDEMPMRDTIXWNTMVSGFLRNGKFDEGFAYFKQMRKSGICWFDQATLTTILSACDRVKFYHVVKMMHGLVFSNGYEKEISVGNSLITSYFKCGCLSSGRQVFDEMFERNVITWTAMISSLVQ

SEQ ID NO: 117421 - protein, 180 aa, Gossypium hirsutum
  unsure (1)..(180): unsure at all Xaa locations
  Clone ID: AI727854.1.pep
TLLSLRRHHRRRSLSHLLCIFPEDPHISSPFLFDPQHLAWRPLPPLPCNPHEYGLCNFTSVSLGPHIYVLGGSLFDTRSFPLDRPSPSSSAFRYNFLTSSWDRLAPMLSPRGSFACAAIPSADQIIVAGGGSRHTLFRAAGSXICSVERYDVERDEWEALNGLPRFXXGCVGFAVXXSGE

SEQ ID NO: 117422 - protein, 172 aa, Gossypium hirsutum
  Clone ID: AI727849.1.pep
MLEAEVEDAENLAMAHWPIPVDLFVSEKHPSLPRGLLAFADSSGNILFRLNSLSHHPKKTLRILDSAGNPLISIYRHHDGSWQGFKGDDGQKDLIFQVQRVSNKFARTELEVFLVAENHRGELTCDFKVKGCHFQRSCTIYNGDSIVAQTSLMHKLRQIYVSRRKIQLTMFP

SEQ ID NO: 117423 - protein, 159 aa, Gossypium hirsutum
  unsure (1)..(159): unsure at all Xaa locations
  Clone ID: AI727829.1.pep
MDSYFLQAKTMCFIVSFKLANRSKLLLAMVVYKLEGFLEFVTCSCVFDLILLLNGGSGYSLMRDPRYNKGLAFTEKERHAHYLRGLLPPIVLSQELQEKKMMNLIRQYEVPLHRYMAMIGLXETNERLFYKLLIDNVEELVPVVYTPTVGEACQKYGSI

SEQ ID NO: 117424 - protein, 177 aa, Gossypium hirsutum
  Clone ID: AI727827.1.pep
MDYSSCRKQLHIAMFPWLAYGHIAPYLQVAKFLAQKNHHLYYVSTPKNISRLPQLPPTLCSNITFIPLSLPHVDGLPPGVESTSELPIHKVPYLKKSFDKLETQLTEFLERSPQIKLIIHDFAPHWLPPMANQLGINLVYFSILNASSNAFLGSPSEILGGSRKSPEDFTVVPTWMD

SEQ ID NO: 117425 - protein, 148 aa, Gossypium hirsutum
  Clone ID: AI727824.1.pep
TLMIQEGLAKTMGCSTVETDYKIHRFVDQDRSNAQMNMVNDVMNIISKMTADKEDAYAHRSTRLKRTDLTRKRPNLPENHSVRWAISFGLISTELGSPVLVRKNIRICEDCHNVAKKISKITKREIIVGDSKVFHHFQDGNCFCGDYW

SEQ ID NO: 117426 - protein, 199 aa, Gossypium hirsutum
  unsure (1)..(199): unsure at all Xaa locations
  Clone ID: AI727822.1.pep
AAQHELKQMSHYADSLRAEKDVQMREMYEKSVRLEADLRELEAMRAELVKVNGDIKQLSAVKQDLTGQVXIMSQDLTRLTGELQQAPVLKAEIENLKQELQRARAAIEYEKKGYAENYEHGQVMEKKLISMARELEKLRAXVANAEKRTRAGGGTGANPAVSGYNANYGNPEAGYTGNTYHVNYGMNPVQGGVDVYRQY

SEQ ID NO: 117427 - protein, 198 aa, Gossypium hirsutum
  Clone ID: AI727816.1.pep
KIHSNGTSKCPWMTDGAGLPSNASELLPKLVTLTKKVTEQVRLLAKDEDETLTEASPYDVIPPYDQAKALGKTNIDIDRIAAGLPCGSEGFLLMYARWRKLERDLYNERKGRFDITQIPDVYDSCKYDLLHNAHLNLKGLDELFKVAQLLADGVIPNEYGINPKQKLKIGSKIARRLLGKVLIDLRNTREETLNVAEL

SEQ ID NO: 117428 - protein, 168 aa, Gossypium hirsutum
  Clone ID: AI727814.1.pep
MAASRSCTLRFMILFSIASFLYQSCYSFLSPPSSIINPSKVKQVSWKPRAFVYEGFLTDLECDHLISLAKSELKRSAVADNVSGKSKLSEVRTSSGMFISKAKDPIVAGIEDKISTWTFLPKENGEDIQVLRYEHGQKYDPHYDYFVDKVNIARGGHRTATVLMYLTN

SEQ ID NO: 117429 - protein, 143 aa, Gossypium hirsutum
  Clone ID: AI727810.1.pep
MATTPLSSHFSPLPSFSSSQSRSVPKPLLFPSSFPSSNFRKLRKTPLLVLSSNNFDAFPLRDASGSNPISSKKSVLNVLIQDIEPLDVSLIHKDVPPTTVDAMKRTISGMFGLLPSDRFQVYIEAMWEPLSKLLVSSMMTGYT

SEQ ID NO: 117430 - protein, 178 aa, Gossypium hirsutum
  unsure (1)..(178): unsure at all Xaa locations
  Clone ID: AI727805.1.pep
AMDKELRSHPNLDCFCSGSTAVTIVKQGNNLFMGYIGDSRAVMGSKDXNGSMVAIQLTVDLKPDLPREAERIKKCKGRVFALQDEPEVPRVWLPFDDAPGLAMARAFGDFCLKEYGVISIPEFSHRLLTERDQFIVLASDGVWDVLSNEKVVEIVSLAPTRSSAARILVDSXAREWKL

SEQ ID NO: 117431 - protein, 179 aa, Gossypium hirsutum
  Clone ID: AI727798.1.pep
EGTDRVQTRVQRYNDLCKHAIELSEEGSLSEESYNIAFCVLVEALKNCVNVNNSCISAVESTGHAQGLREAEEKNQGSLASKSSKKKSTNRKRKGQSEPALMFVDTQDSLQPMENLSSDGITLNGYYGAQQNVQGLVQLNLMEPPHDGYYVNQQSMQGLGQLNSMAPGHDSFFGTQQSM

SEQ ID NO: 117432 - protein, 180 aa, Gossypium hirsutum
  unsure (1)..(180): unsure at all Xaa locations
  Clone ID: AI727795.1.pep
DCSDEIRICCSNALHLLCEHYKWKTVEVTIPEIESMRLAHYLTIGSECTTSLSSALEKLDFAELGWDARVALRVYGAFNSKEYIKAQKMRNRQMQIHKNIFAKADVIVAPTTGVTAYSIFDDALXTGELDYINGAALVRYQIAGNFLGLPAVTVPVGYDKKGVPIGLQFIGKPWSKPTLI

SEQ ID NO: 117433 - protein, 165 aa, Gossypium hirsutum
  unsure (1)..(165): unsure at all Xaa locations
  Clone ID: AI727790.1.pep
MKLPKLSILFLLLLITIQTKAALGVKAQSSSKEAYVTLLYGDEFLLGVRVLGKSIRDTGSTKDMVVLVSDGVSDYAKKLLKADGWIVEMISLLANPNQVRPKRFWGVYTKLKIFNMTNYKKVVYLDADTIVVKSIEDLFKCQKFCANLKHSEKLNSXVMVVEPSE

SEQ ID NO: 117434 - protein, 126 aa, Gossypium hirsutum
  unsure (1)..(126): unsure at all Xaa locations
  Clone ID: AI727763.1.pep
MDISTALLLLAAITAYLLWFTFISRSLQGPLVWPLLGSLPGLIKNCDRMHNWISNNLRAGGGSYQTGICAIPFLGPKQGSREGSFAIQDFGDHSSISRPDNXYPKGHMWQAVSQNLLGQGISNLKG

SEQ ID NO: 117435 - protein, 60 aa, Gossypium hirsutum
  unsure (1)..(60): unsure at all Xaa locations
  Clone ID: AI727761.1.pep
LLKSKTLFPKVNNYNSNKSIDENGSIFMVLLSTFVAVCGAFEFGTCVXYSAPTQAAIRED

SEQ ID NO: 117436 - protein, 202 aa, Gossypium hirsutum
  unsure (1)..(202): unsure at all Xaa locations
  Clone ID: AI727749.1.pep
ELGHAMEAVKWGTDYLIKAHPEPYVLYGEVGDGNTDHYCWQRPEDMTTDRHAYKIDPSNPGSDLAGETAAAMAAASIVFRRSNPAYSSELLHHAYQLFDFADKYRGKYDSSITVAQKYYRSVSGYNDELLWAAAWLYQASNNQYYLNYLGKNGDSMGXTGWXMTXFGWDVSSWGSNLVASSNASKLVSCPVLKVHQKQTLCH

SEQ ID NO: 117437 - protein, 121 aa, Gossypium hirsutum
  unsure (1)..(121): unsure at all Xaa locations
  Clone ID: AI727737.1.pep
PDSESKNETWSDCTKTSNIQKPVKGNAVLFFTTHLNGSPDSSSPHARCPVLEGEMWFATKFFYLRAVTGETISFDSSRNECSDEDPSCPEWAAVGECQRNPVFMVGSPDYYGTCXKSCNAC

SEQ ID NO: 117438 - protein, 74 aa, Gossypium hirsutum
  Clone ID: AI727726.1.pep
KCSSCDCSSCNCGSCFSCCKVPKWQCCCRKMCCCNFQPHSCTNWCSCKWKCYCPKCPKLCNCFSCTKTCCNPCC

SEQ ID NO: 117439 - protein, 225 aa, Gossypium hirsutum
  unsure (1)..(225): unsure at all Xaa locations
  Clone ID: AI727723.1.pep
LLPFLSNSIPPPAQADHSEIISRFQQYLQINTSQPSPDYQKSTHFILSQADSLSLQSQVIEFVQGKPIVLLQWPGSDPSLPSILLNSHTDVVPSEYSKWVHPPFGAHIDEQGNIFARGSXEMNCVGMXYLEAIRRLRSSGFCPKRSLYLSFVPDEEIDGRDGAEMLASSDVFKNVNVDIVLDEGLASPNENYXVFYGERAPWWLVIKSNGTPGHGAKPYENSAWE

SEQ ID NO: 117440 - protein, 197 aa, Gossypium hirsutum
  unsure (1)..(197): unsure at all Xaa locations
  Clone ID: AI727721.1.pep
MILERCLGSMLLALSMLSNVLGAFVGVNIGTDVSSMPPASDVVAIVKAHQITHIRLYDADPHMLKALAGSGIEVTVGVTNEEVLGIGESASAAAAWINKNVAAYMPSTNITAIAVGSEVLTSXPHAAPVLVTAMNNLHKALVXADLNFQVKVSTPQSMDIIPKPFPPSTSTFNSSWNSTIYXLLQFLKSTSSYYMLN

SEQ ID NO: 117441 - protein, 217 aa, Gossypium hirsutum
  unsure (1)..(217): unsure at all Xaa locations
  Clone ID: AI727700.1.pep
FLQHRFLSTDSVDLHEVHETAASNGGANHTDHGWQKVSYPKRQRKTKSKADPEKPNLTRLNGTLTNGGPNVFHSLEQQSEDRRRRILEAQRAYAADVVDADAKVKNNRSDLDDDDDSDLEGVKPNGKPAEVEKKVKQKKPKKPKVTVAEAAAKINPXFLSVHLAELNGEQQEIQMQKFANFYGKAFQEVVSGQXPWMKXFXESTITKLADIPLSHMS

SEQ ID NO: 117442 - protein, 99 aa, Gossypium hirsutum
  unsure (1)..(99): unsure at all Xaa locations
  Clone ID: AI727678.1.pep
MGNCCKSPXAVAREDVKXNFSGHDHGRKDSVSKQKPPITVLNGVSKENIEEKYLVDRELGRGEFGVTYLCIXRGTRELLACKSISKRKLRTAVDIENVR

SEQ ID NO: 117443 - protein, 161 aa, Gossypium hirsutum
  Clone ID: AI727676.1.pep
MVQYNFKKITVVPNGKDFIDIILSRTQRQTPTVVHKGYAISRLRQFYMRKVKYTQQNFHEKLSTIIDEFPRLDDIHPFYGDLLHVLYNKDHYKLALGQINTARNLISKIAKDYVKLLKYGDSLYRCKSLKVAALGRMCTVIKRIGPSLAYLEQIRQHMARL

SEQ ID NO: 117444 - protein, 122 aa, Gossypium hirsutum
  unsure (1)..(122): unsure at all Xaa locations
  Clone ID: AI727672.1.pep
MSSLQRGFDQKIDYVFKVVLIGDSAVGKSQLLSRFTRNEFNIDSKATIGVEFQTKTLLIDHKSVKAQIWDTAGQKRYRAVTSAYYKRTXGAMLVYDITKRQSFDHVAKWLEELRGHADKNIV

SEQ ID NO: 117445 - protein, 117 aa, Gossypium hirsutum
  Clone ID: AI727658.1.pep
MSAKEDAKGRRPGKGKAKWIRILLGVGYWVQGFRCFPWMAVNFFLKDSVKVDSSTLQILQNSVNLPMVGKPIYGVVSDAVYISGQHRVPYIAIGAFLQAMSWLTIVILSQSNISIVT

SEQ ID NO: 117446 - protein, 134 aa, Gossypium hirsutum
  Clone ID: AI727650.1.pep
MVFKNKLFFSSSKKSGSSSPDGSSNSPRSTSNSPIRSDKKKPKASLPNSDSQQIPNSPSLFSPTAFKPTQVKDGPARKDLKPSEPQTPVAKPSSSTSKKPDAKEGPSSVSPLLASSLGLNRIKTRSGPLPQENF

SEQ ID NO: 117447 - protein, 95 aa, Gossypium hirsutum
  unsure (1)..(95): unsure at all Xaa locations
  Clone ID: AI727626.1.pep
VEQGGTIVVAINLIKGSGVEKKQIKGLFVLGGFSALXKVGGEFPGVXGKKGIIDSNVNGEGFLIFXIGDAGDRSFGKWVESKFKGKIFFMQFWFF

SEQ ID NO: 117448 - protein, 162 aa, Gossypium hirsutum
  unsure (1)..(162): unsure at all Xaa locations
  Clone ID: AI727624.1.pep
QGLLVYGINGREIFKRNLDPNVCKEAGHYSLEHKVPLVAFCQDCCLTLFNHPLVDTLHTVYHEPKAEIMPSVEHLVTAADIQKLIFFDTAEGIATNLRPYWSEATKDHASVVQAVSDMLEIVPFGTSKGSGVKLLLXHLGVSSKEVQDSYLLFSFCSRNLLQ

SEQ ID NO: 117449 - protein, 194 aa, Gossypium hirsutum
  unsure (1)..(194): unsure at all Xaa locations
  Clone ID: AI727622.1.pep
RTLLKVIVLGDSGVGKTSLMNQYVHMKFTQQYKATIGADFVTTELQIDDRDVTLQIWDTAGQERFQSLGVAFYKGADCCVLVHDVNVMKSFDSLDNWHEEFLKQANPTDPRTFPFILLGNKIDVDGGNTRVVSEKKAKDWCASKENIPYFETSAKEDINVDVAFHCIAKTALVNEREQDIYFQGIPNAVXETEX

SEQ ID NO: 117450 - protein, 124 aa, Gossypium hirsutum
  Clone ID: AI727619.1.pep
MNSEEAKRSISGALTVKPATDERKPSPALAAESTTLAAKKVVIKSADMKDDMQKEAVNIAIAAFEKNNVEKDVAEHIKKEFDKRHGPTWHCIVGRNFGSYVTHETNHFVYFYLDQKAVLLFKSG

SEQ ID NO: 117451 - protein, 160 aa, Gossypium hirsutum
  unsure (1)..(160): unsure at all Xaa locations
  Clone ID: AI727603.1.pep
MGLANYITAILNFAAFLCSIPIIAAGIWFAQKPDNVCIHLFRWPVIVLGFLILLVSLAGFVGACFYKKTLLAFYLCCMAILIALLLILLVFAFVVTRPDGSYDVPGKGYKEYXVDGYSXWLRNRIVDSKSWYKIRACLADTDVCXKLNQQYITVDQFFAA

SEQ ID NO: 117452 - protein, 170 aa, Gossypium hirsutum
  Clone ID: AI727592.1.pep
PLTGKTWTLEDFESYPALLVMFICNHCPFVKHLKKDIAKLSNFYMKKGLAVVAISSNSVATHPQDGPQFMAEDAKLYNYPFPYLYDETQDVARDFGAVCTPEFFLFKKDGRRPFELVYHGQFDDSRPSNSVPVTGRDLSLAIDSVLSGQPVPSVQKPSVGCSIKWHPQKS

SEQ ID NO: 117453 - protein, 99 aa, Gossypium hirsutum
  unsure (1)..(99): unsure at all Xaa locations
  Clone ID: AI727589.1.pep
DLLGMLQHPHHAKVTPKFCKQYACVGDVIKKALSEYKEEVNNGSFXGPSHTPYKMNPDDVNGFFNELEKLGLNKAASAATAAAEKMNTAQRPDTETSQK

SEQ ID NO: 117454 - protein, 78 aa, Gossypium hirsutum
  Clone ID: AI727562.1.pep
RWWWNAFFASSSVSLYVFLYSINYLVFHLQSLSGPVSAVLYLGYSMIMAVAIMLATGTIGFITSFYFVHYLFSSVKID

SEQ ID NO: 117455 - protein, 186 aa, Gossypium hirsutum
  unsure (1)..(186): unsure at all Xaa locations
  Clone ID: AI727561.1.pep
GRIECIRWVTESADAREMDAINGDGTYVRVIGHLQNFQGKKQLNAFSVRPVTNFDEITCHFIECIHYHLQNSKVQLEGGAPXXPQMTNSSFSTPVRGASNGYQPASVNDVSVQYSTDGFKGFDKLVLNYLQQPSNIDREIGVHVNELSQHLKAPVKKIKDAIEFLEREGLVYSSIDDYHYKAVEGC

SEQ ID NO: 117456 - protein, 217 aa, Gossypium hirsutum
  unsure (1)..(217): unsure at all Xaa locations
  Clone ID: AI727541.1.pep
QQGTNGEQLVCKLRKALYGLKQAXGAWFHKLREFLVSMKFEVSKADNSLFILRSKSQLMYVLVYVDDIIITRNDDQAIGEFVHQLHAKFSLKDLGKLKYFIGIEVRYTSQGLFLSQKKYILDLLQRTSMDRSNSLPTPMVTTCHLSSTSGSPVEDDHHYRSIVGALQYILITRPDIAYSVNKVCQFMHRPLDVHFKAVKRILRYLQGTLNYGLKFIR

SEQ ID NO: 117457 - protein, 169 aa, Gossypium hirsutum
  unsure (1)..(169): unsure at all Xaa locations
  Clone ID: AI727533.1.pep
MASSASITPSYFASSSLPPRPISSHFPFNLNSSTFFFPLKNGSFKLRNAPPLSPKVLSARAPKAAVVTKDTWEKSVLNTDSPVLVEFYASWCGPCRMVHRIIDEIAGEYAGRLSCFILNTDDDFPIAEDYXIKAVPVVLLFKNGEKRESVVGTMPKEFYIAAIKKVLXS

SEQ ID NO: 117458 - protein, 216 aa, Gossypium hirsutum
  unsure (1)..(216): unsure at all Xaa locations
  Clone ID: AI727531.1.pep
YNYLENNSLSQTLLGSGHSNIQFNWRTRSKICIGIARGLAFLHEEVRPYIVHRDIKASNILLDKDLTPKISDFGLAKLIPANLTHVSTRVAGTIGYLAPEYAIRGQLTRKADIYGFGVLLIKIVTGRCNTNTRLPVXEQYLLKRTWDLYEKRELVGLVNKLLNGDFDAEEACXYLKIGLLCTQNAPKLRPSMSSVVKMLTGQKMVDERXIXKPGLI

SEQ ID NO: 117459 - protein, 145 aa, Gossypium hirsutum
  Clone ID: AI727506.1.pep
MFAGDQNGLQGDPRLKAISEAIRVVPHFPKPGIMFQDITTLLLDHTAFKDTVDIFVDRYRDMGISVVAGVEARGFMFGPSIALAIGAKFVPLRKPKKLPGEVISESYVLEYGKDCLKMHVGAVQPGERALVIDDLVATGGYLSAA

SEQ ID NO: 117460 - protein, 145 aa, Gossypium hirsutum
  unsure (1)..(145): unsure at all Xaa locations
  Clone ID: AI727501.1.pep
MAVSPCLSANDQKKHWWVSNXKLVEKYVKDARCLMATQEQSEMASALNLLNAALALSPRFEIALELKARCLLYLRRFKDVADMLQDYIPSIKISSDDSASLSSDNSSQPLSRERVNLLRPPNSQDPSFKCFSVSDLKKKVMAGMS

SEQ ID NO: 117461 - protein, 209 aa, Gossypium hirsutum
  unsure (1)..(209): unsure at all Xaa locations
  Clone ID: AI727467.1.pep
GRREERGEDVTDSEDDEDSNQSSVTRRCESVNTLASFIWWIVGFYWVISGGNILLQQAPRLYWLAVVFLAFDVFFAIFCVVLACLIGIALCCCLPCIIAVLYAVAGXEGASEXDLXILPKYRFQFINIGEKPSVGAGKMVPIKTSSGYLANERILLPEDAECCICLCSYEDGVDLHALPCNHHFHSTCIVKWLKMNATCPLCKYNILKV

SEQ ID NO: 117462 - protein, 120 aa, Gossypium hirsutum
  unsure (1)..(120): unsure at all Xaa locations
  Clone ID: AI727466.1.pep
DLIHYKSKLGVFPFKFKEQVLNSKNPXTFHFNTSINILEIFAVFLPYPLESFLVLFPKNSSESRQIKPQVQGINKIKETRQYLTYELETNELSLMNIIKKTYITQFFLPYLEKNPFQALA

SEQ ID NO: 117463 - protein, 199 aa, Gossypium hirsutum
  unsure (1)..(199): unsure at all Xaa locations
  Clone ID: AI727450.1.pep
NGPFLLNLDCDHYINNSKALREAMCFLMDPNLGKSVCYVQFPQRFDGIDKNDRYANRNTVFFDINLRGLDGIQGPVYVGTGCVFNRTALYGYEPPLKPKHKKPGLFSSCFGGSQKKSSKSSKKDSXNKKSGKHVNLTVPIYNLKNIXGVXGAGFXDENSHLLSQMTLKKRFGQSAFFVASTLMENGGVPXSATPESLLX

SEQ ID NO: 117464 - protein, 60 aa, Gossypium hirsutum
  Clone ID: AI727447.1.pep
LSKDLVNAVLTCYFFVLGTVALSATILPAMKRFLPKHWNEDLIIWRFPYFRCMSLFYYSF

SEQ ID NO: 117465 - protein, 177 aa, Gossypium hirsutum
  unsure (1)..(177): unsure at all Xaa locations
  Clone ID: AI727425.1.pep
PIQSKITNKVFFDVSIGNPVGKLXGKIVIGLYGDDVPQTTENFRALCTGEKGFGYKGSAFHRVIKDFMIQGGDFDKGNGTGGKSIYGRTFKDENFKLSHAGPGVVSMANAGPNTNGSQFFICTVKTPWLDQRHVVFGQVLEGMDTVKLIESQETDRGDRPRKKVVIXDCGELPMSET

SEQ ID NO: 117466 - protein, 199 aa, Gossypium hirsutum
  unsure (1)..(199): unsure at all Xaa locations
  Clone ID: AI727415.1.pep
SQVPTLSLNTTSQPKIYTSSATAAAISAFKICLGVEPDVVTYNTFVDAHCKEGMVSEAEDIVDAMIKRGIEPDVVTYSALINGHCLQNEMDKARRVFNLMIEKGCAPDIVTYSTMINGYCKGERLDKAMELFHEISRKGPFPDTVSYNILMQSMCQLGEVSTACKLFKKRLASGQIPNIXTCLILLDGLCKTGHIXKAL

SEQ ID NO: 117467 - protein, 80 aa, Gossypium hirsutum
  Clone ID: AI727406.1.pep
FGKTRVFPLKKVLKGGPGGGGKRIYFGGIGGSPRGGPPEFFFFFFFFFFFPPFFLFFFFFFFFFFFFFFFFFFFFFFFFF

SEQ ID NO: 117468 - protein, 195 aa, Gossypium hirsutum
  Clone ID: AI727393.1.pep
MLTSKYVSDIIMLISSSMATRDRSAESARFDILNAQYSAVILNNENSSIHIDAVVDPLSPSGQKLSSLLRVLAKYVHPSMRIVLNPMSSPVDLPLKNYYRYVIPTMEDFSSTDYTVNGPKAFFANMPLSKTLTMNLDVPEPWLVEPVIAVHDLDNILLENLGDIRTLQAVFELEALVLTGHCAEKDRDPPRGLQL

SEQ ID NO: 117469 - protein, 204 aa, Gossypium hirsutum
  unsure (1)..(204): unsure at all Xaa locations
  Clone ID: AI727374.1.pep
LEPLSWKRRLNIALDVARGMEYLHTLGHQSFIHKDLKSSNILLGDDFRAKVSDFGLVKLAPNGEKSVVTRLAGTFGYLXPEYAVTGKITTKADVFSFGVVLMELLTGLTALDDDRPEETHYLPAWFWHIKPYKEKLRAAIDPSLDVKDETFESVSIIAELAGHCTAREPSQRAYMGHAVNVLAPLVEKWKPLDDDNDDYCAIDY

SEQ ID NO: 117470 - protein, 188 aa, Gossypium hirsutum
  unsure (1)..(188): unsure at all Xaa locations
  Clone ID: AI727370.1.pep
FLSSLLQKLAESNDVNRRFKAQKVSVFHGLSRPTISIQNYLDRIYKYANCSPCCFIVAYVYLDRFAQRQPSLPINSFNVHRLLITSVMVAAKFMDDMYYNNAYYAKVGGISTTEMNFLEVDFLFGLGFQLNVTPNTFNTYYSYLKRETMLXQCPPSIVESSLSLGRSLNLHLCFNEEDSTHQNQQLTV

SEQ ID NO: 117471 - protein, 152 aa, Gossypium hirsutum
  unsure (1)..(152): unsure at all Xaa locations
  Clone ID: AI727368.1.pep
MANRYWVVSLPVQKSASTLWNSLQDQISKHSFDTPLYRFNIPNLRVGTLDSLLALSDDLFKSNTFIEGVSQKIRRQIEELERVSGLESNALTVDGVPIDSYLTRFVWDEXKYPTMSPLREIVDGIHTLLAKIEDDLXVRVADYNNVRXQLNA

SEQ ID NO: 117472 - protein, 101 aa, Gossypium hirsutum
  unsure (1)..(101): unsure at all Xaa locations
  Clone ID: AI727367.1.pep
MSDLVARTGRLQQRYENGYRLVAGCIPFRYRCLDESHHENSENVVEVLMINSTSGPGLLFPKGGWENDXTVEKAAVREAIEKAGVRGDLLVDILFSWFYLC

SEQ ID NO: 117473 - protein, 188 aa, Gossypium hirsutum
  unsure (1)..(188): unsure at all Xaa locations
  Clone ID: AI727357.1.pep
GIYAYRQKMRAERANKNSNPFASWDSKKSFGDSPQLKGARCFPFDELKKYTNNFSDACDIGSGGYGKVYXGTLPTGELVAIKRTQQGSMPGGVEFQTELQLLSKIPPKNVLRLLRFCFQPSXPIPIYEFVAHGSLGDNLSRKFGIPLDWGRRIKITLRAAPSLAYLPELANPPIIPRDVQSTNILFDE

SEQ ID NO: 117474 - protein, 189 aa, Gossypium hirsutum
  unsure (1)..(189): unsure at all Xaa locations
  Clone ID: AI727300.1.pep
MFKAKIFVSSIRNPLSHPQFEHQQWRGIVKVRLKWVKNRSLDHVIDTDTDLKTACLLKDAIKRSPTGFLTAKSFADWQKLLGLTVPVLRFLRRYPTLFEEFPHARYVNLPCFRLTGTALLLDSQEQSIHQAHENDTIERLSKVLMMMRNXNAPLQSLHSLIWDLGLPNNFEKVLIPRYPDHFSFVRGTT

SEQ ID NO: 117475 - protein, 110 aa, Gossypium hirsutum
  unsure (1)..(110): unsure at all Xaa locations
  Clone ID: AI727283.1.pep
HKNAYQSTYHHNXGEDTFTNKRWSSHEIHNNHYSNGNNGYNNGEXGITDNKYYENGSYXYDLXIDIYYYPHRCDNSRGIATTNKFNDNPYXHVGRYLPNQHDFEDSYDEC

SEQ ID NO: 117476 - protein, 203 aa, Gossypium hirsutum
  unsure (1)..(203): unsure at all Xaa locations
  Clone ID: AI727281.1.pep
KYDSWDGENVNGCASKKHDAVMRRERALAYAYSYQEEQRQHHEQLLMQPQHNGKDVGVYLNEREKAQWGWNWLECWMSXQPYPARQLGLQEGAYMALPRATTTTDNMSEKTVEMDDVTPIKSGSYLTXQQLQSDSSSVPSYMVTTQSAKAKVRSQGSXXXQRGPYVPEWNSSTKKASGCDSSSSGGGPTIYXAPKSPGPKSNG

SEQ ID NO: 117477 - protein, 191 aa, Gossypium hirsutum
  unsure (1)..(191): unsure at all Xaa locations
  Clone ID: AI727263.1.pep
TKRLHFSPFFLFQKLWKRYYHNGLLPSSVTRKNLTCGLNSTRLLALSRSLHTFSLPDLPXEYGALEPAISGEIIRLHHQKHHXTYITNYNKALKYLHHAIXKDNSSTGFKLKSAIKCIXGRHFHHSIFWMILAPIRERRRDPLKTSLGRAIDXHFGTLESLIQKMNTDGAALHGSGWVWIGLNKELLKLVI

SEQ ID NO: 117478 - protein, 158 aa, Gossypium hirsutum
  unsure (1)..(158): unsure at all Xaa locations
  Clone ID: AI727259.1.pep
MRFFRRIAGLLGLAKNDGQEVKDQENDPQNNSQTPNNPPVFQETGLPRRGFSVPVQVAAARPHPAPLLLPCSSSDGGVXGLKWYAKRLRIXEDGDVXDEFLDEVLPQTSGSANAENEKAFPKFQVKYNTRAANVKTQVMSHDGKIQQCVXYQGRLQWI

SEQ ID NO: 117479 - protein, 153 aa, Gossypium hirsutum
  Clone ID: AI727207.1.pep
IHSMVETQDSSVLAQLGWPDMRLPILYTMSWPERIYCSEITWPRLDLCKLGSLTFKAPDNVKYPSMSLAYAAGRAGGTMTGVLSAANEKAVELFIDEKISYLDIFKVVELTCEKHQEEFVATPSLEEIIHYDLWARDYAASIQQSSGLSPVLA

SEQ ID NO: 117480 - protein, 75 aa, Gossypium hirsutum
  Clone ID: AI727199.1.pep
HSFCPMLYSISTKVYGLSPCSIIHISGISSFLDHSSTVPSVDWAPTNWLPYIALSSLHPLACFAEAHLVEDVETH

SEQ ID NO: 117481 - protein, 205 aa, Gossypium hirsutum
  unsure (1)..(205): unsure at all Xaa locations
  Clone ID: AI727195.1.pep
MEKLKCVVPERLKRRVEESHIDDLPSLSSSLLQLFLSLPQIHQLISELAAEPSTQAGLCGKNEGAALDLKQKGNQCYSSGDHSQALRCYSQALRLAPIDAHHTGKNLVATLYLNRASLFHKMGLPMESLRDCSRALXISPCYPKVWYXRGKVNATLGNYXNSVHDLSVAKDMEPXNRGKKQIXRELDMLAPHHEKTTAKPASQNY

SEQ ID NO: 117482 - protein, 143 aa, Gossypium hirsutum
  unsure (1)..(143): unsure at all Xaa locations
  Clone ID: AI727184.1.pep
MAMAFKMATTGMWVTDECKNSFMEMKWKKVHRYIVFKIDEKSRLVTVDKVGGPGESYDDLTASLPIDDCRYAVFDFDFVTVDNCRKSKLFFIAWSPAASRIRAKMLYATSKERLRKVLXGIXYEVQATDPTEMGIDVIKHKAN

SEQ ID NO: 117483 - protein, 101 aa, Gossypium hirsutum
  Clone ID: AI727084.1.pep
RPHRKLGSVSLQRRVHDSIRYRVRYYGLVRLFAEPPSSMIDPLMFDRDQNVEVTSYPAHYVLRPRIHSELSTSSPDGSAQSALPRSSPRADSPLEPLIPHD

SEQ ID NO: 117484 - protein, 197 aa, Gossypium hirsutum
  unsure (1)..(197): unsure at all Xaa locations
  Clone ID: AI727075.1.pep
MSENKPESGPTVNPRVTWEGCSVLLDINDGDRLVFARLSAGSTLKIGNKTFSLQPLIGCPFGSLFQVESGKEKPYLSRFIPPTEENNVQDEGGCQLQEESRDNRAIIDNNQAQSLTGDDIDAMRRXGXXGNEIVEALIANSATFDKKTQFSQKKYRLKKQKKYAPRVLLRRPFSRSICEAYFKKYPARIGFLRVDAF

SEQ ID NO: 117485 - protein, 203 aa, Gossypium hirsutum
  unsure (1)..(203): unsure at all Xaa locations
  Clone ID: AI726978.1.pep
LQLIFQRGCGTEDRRPSRELSKETCTRDGDNHYHLKRSLLVLDQDLNCLPNSGANSELLKSRQTEQNATGVAVKKKKRADSKDVARIALEDLAKYFDLPIVEASRNLNVGLTVLKRKCREFGIPRWPHRKIKSLDGLIRDLQEEAEQRQQDEAAAYAVXKRRMMLETEKESIKKEPFIELKSETXRFRQDIFNRRHKARALKN

SEQ ID NO: 117486 - protein, 202 aa, Gossypium hirsutum
  unsure (1)..(202): unsure at all Xaa locations
  Clone ID: AI726970.1.pep
ALDGLMGPVYVGTGCLFRRIALYGFDPPRSKEHHAGCCSCCFGRSRKHSSMAHTPEENRALRMGDSDDEEMNLSLLPKRFGNSTFLIDSIPVAEFQGRPLADHPAVKNGRPPGALTIPRELLDASTVAEAISVISCWYEDKTEWGQRVGWIYGSVTEDVVTGYRMHNRGWXSXYCVTKRDAFRGNAPINLTDRLHQVLRWAT

SEQ ID NO: 117487 - protein, 204 aa, Gossypium hirsutum
  unsure (1)..(204): unsure at all Xaa locations
  Clone ID: AI726955.1.pep
RVHHCHVVPLLGYCLEFSGKHAERLLVFEYMHNGNLRECLNGIWGENLTWETRVSIAIDAAKGLEYLHEAAAPRILHKDIKSTNILLDKNWRAKITDLGMAKRLRADGVPSCSSSPARMQGTFGYFAPEYVIVGKASLMSDVFSFGVVLLELITGRQPIHKSNNKEESLVIWATPRLXDCKQVTPKLPXPRLXGNFPXKKMQXM

SEQ ID NO: 117488 - protein, 205 aa, Gossypium hirsutum
  Clone ID: AI726954.1.pep
ANENESVDVDPKLAVLGSSFTCEVKIYAKCQDLILECAPDVLYKKQNDAVQSASLKVLSWLNAYLKDTYMSLEKEKQLANVFDIKFYRQIFFKEVVKCLSVCNCQHNETLGGKEPELNGVVENDASYINIEGTDSGLCPSNGSLLCVCYSVSLVTKGELQKELLESIEEFEFENGTGAVIPCLEAVVSQMSVGQSACFYTELPPD

SEQ ID NO: 117489 - protein, 150 aa, Gossypium hirsutum
  Clone ID: AI726944.1.pep
RRPAENVRCHSSDRSNVEGEGKKARALRRVPKGGGNPRSRNGAQKCQNSDNLEAKGFFFKEPPRLGGIFTKKNVGPGGGQLGQTVGGAQFKDDSIGPVKYGSGGGHITFLGKRSVLSGGSKGAPAGFRGEMGEQVPFPYNKNISYGDPNY

SEQ ID NO: 117490 - protein, 71 aa, Gossypium hirsutum
  Clone ID: AI726926.1.pep
TLLFLLLYIIQLFFLLKTAHFFHPKKNTSFYFNFSLFISVFDSCLKGLFFKKNFLYFSVFLYMKFCFVGSF

SEQ ID NO: 117491 - protein, 141 aa, Gossypium hirsutum
  Clone ID: AI726923.1.pep
MKGLFKSKPRTPVDIVRQTRDLLIYADRSPDSRESKREEKMAELCKNIRELKSILYGNSESEPVSEACAQLTQEFFRENTLRLLITCLPKLNLKARKDATQVVANLQRQQVHSRLIASDYLEANLDLMDILIPGYENTDMA

SEQ ID NO: 117492 - protein, 134 aa, Gossypium hirsutum
  unsure (1)..(134): unsure at all Xaa locations
  Clone ID: AI726922.1.pep
YLYGVLHSPSFPHPSTPPWVXPSHPVPYPLRVCPRPPPSLPSAPHPAPAPRPSSPPPPPLPPFPPSPSPPPPLPFAFPPSPPLVPPSPPSPPAXPSILPPSPSSPPPSRLLPPACPPLYVPAPCPSPPSPPRVI

SEQ ID NO: 117493 - protein, 188 aa, Gossypium hirsutum
  unsure (1)..(188): unsure at all Xaa locations
  Clone ID: AI726914.1.pep
MAWLIRFKARSLVSATRSLRDTLDSYRCSLSHFSGFTTDDSVRSFPRKWLCSKAMRLNDVDDIQSRSSSSPDITRRPSVSASSNSLGVGLQEVTGSKLNLFDELKLRFLSFKHHKYLEELEHFETLKEAQTPKFMVIACADSRVCPSTILGFRPXEAFMIRNVXNLVPPLQKGPSXTNAALEFAVKTL

SEQ ID NO: 117494 - protein, 188 aa, Gossypium hirsutum
  unsure (1)..(188): unsure at all Xaa locations
  Clone ID: AI726864.1.pep
MANATLLCSPLPIFKQTHSLPTLRCPEFLKKPPPLTGNLSIPTLNWKPKPVIGIVGSALTLALAGSASASELPLLLGTSLPLSEPANALSLPTWAIHVSSVVEWITAMALVWQYGEKSGFESWKGLSWGMVPLLGGAFCACTXHXFYNSESLEVLVALQAALTVIGNATMCYAAFRICKVTDKNSQKL

SEQ ID NO: 117495 - protein, 186 aa, Gossypium hirsutum
  unsure (1)..(186): unsure at all Xaa locations
  Clone ID: AI726839.1.pep
VYAPPKKEKHGPKPPMYEPPKKXEKPEPKPPIYSPPKKKEPXLNPPFFNPPKKENLXPKPPIFSPPKKEKPXPNPPFFXPPKKGKPQPKPPVFSPPKKEKPXPNPPFFXPPKKPPMFQSXPPKPPVFIPLQNNKPEPQPPMFXTSPKTSPVCNLNPPNPPVYTPSPERNTPNPCPPCVLPLNKPPI

SEQ ID NO: 117496 - protein, 181 aa, Gossypium hirsutum
  unsure (1)..(181): unsure at all Xaa locations
  Clone ID: AI726827.1.pep
MAERGGGERGAFRRGFGGRSDRGPRGRRRGRREEEEKWVPVTKLGRLVKTGKITSLEQIYLHSLPIKEYQIIDQLVGPSLKDEVMKITPVQKQTRAGQRTRFKAFVVVGDGNGHVGLGVKCXKKVATAIKRAIILAKLSVIPVRRGYWGNKIGKPHTVPCKVTGKCGSVTVRMVPAPRGAG

SEQ ID NO: 117497 - protein, 226 aa, Gossypium hirsutum
  unsure (1)..(226): unsure at all Xaa locations
  Clone ID: AI726792.1.pep
LSSVLFARDRWLKPGGAILPDTATIFVAGFGKGGTSLPFWENVYGFNMSYIGKEVVEDAAKFPIVDIINHHDLVTNAAVLQSFDLATMKPDEVDFTATAELEAKNDTLDHKATACYGVVLWFETGFTSRFCKEMPTVLSTSPYTPKTHWSQTILTFREPISVASSKFTADGSAAVGTDACPASKILLRIXIARATQHRCIDISLQTAGIGSDXRKRXWPVQMFNLT

SEQ ID NO: 117498 - protein, 216 aa, Gossypium hirsutum
  unsure (1)..(216): unsure at all Xaa locations
  Clone ID: AI726766.1.pep
MENQPAVRFTLRKQSSMAPDTDGGEADGTQNDDRQDIHEGLTLMFLANQGDLDGVRXLLDSGIPLDFRYLDDLTALPIAACPRPTDVVSLLLSRRADVDSTDRWGRSPXADAVSSLNRDVIWLLQIHGSWPLLAPVPVVLPRRVPQYDIDPAQLDVAAGVHLPSGTFCXAFVRGSRVALIRVGYEVSPDHGSGERCSTLSLPSFSTVPRPVVVPFL

SEQ ID NO: 117499 - protein, 200 aa, Gossypium hirsutum
  unsure (1)..(200): unsure at all Xaa locations
  Clone ID: AI726765.1.pep
FLLYGSLKIVIRPSLNLPDLSQFYTPCLQVCPHPISHNQSKWILTTTCDDLPLPPLDLFHSVTGFLHDIGDNIHETIRFGNPTAHVPEIHLPCITLDKAYIVVYVLTHNPHPVPFPLVXFDYFPDTDGTPLLSGFIPHPGITPAHGDDTXPIPVTLILDHTSRSYHDPIPRIXLPFLLIVDLLVHLPLFGTFTPPLPLPL

SEQ ID NO: 117500 - protein, 208 aa, Gossypium hirsutum
  unsure (1)..(208): unsure at all Xaa locations
  Clone ID: AI726760.1.pep
MEMETEFTQKPFQVDMGNLLAFNPFHNFPSLPTSRDELVKECIQEGTKLVQAIADSVFNLPSTEDADGPLVKLPTPTTKLPREKHLPKPKPPTKWEEFAKKKGITKRIKDKVLWDEQTGTWKRRFGYDRVNDDKDIPIIEAKMTDEPGVDPFAXTQDDQKRRVXKRDKNRLHNLKQAAKIGALPNPVQLAATALPITGSQAPPKKITS

SEQ ID NO: 117501 - protein, 222 aa, Gossypium hirsutum
  unsure (1)..(222): unsure at all Xaa locations
  Clone ID: AI726759.1.pep
DAVVVAWVLNATLVVPELDHNSYWKDNSDFVNIFDVNWFISYLVKDVTIVKKVPDKFMRSMEKNPYSMRVPRKSPPEYYLDQVLPILKRRRVLQLTKFDYRLANNIDEELQKLRCRANFHALRFTKPIQELGQKLVLRMREMAIRLIAVHLRFEPDMLAFSGCYFGGRDNERYXLAEIRQRWETLPDLDADGERSRKXCPLTPPEVRLMLRALGFXNETYLL

SEQ ID NO: 117502 - protein, 226 aa, Gossypium hirsutum
  unsure (1)..(226): unsure at all Xaa locations
  Clone ID: AI726747.1.pep
PSSRSTSSRASTPSKVRQSPTSSYLDKSRPSQSSRPSTPTSRPQVPANLNSTAVRSNSRPSTPTRWNPAASLSSLVNPSPSSNGHTVSNGRTAAPASRPSSPGPRVRPPQQPVVPPDFPLDTPPNLRTTLPDRPISAGRSRPSASVTTKTNQDTTSSINMXKKNSSPIVPRGELXEPPGRTRVHSNGHPSDIHQSPKISHVSGLAMRKPVKSSTTTCRWPPIWDGL

SEQ ID NO: 117503 - protein, 168 aa, Gossypium hirsutum
  unsure (1)..(168): unsure at all Xaa locations
  Clone ID: AI726740.1.pep
NLGTAELGLFKTPPDLIIPISSDGERGHWFTVESESDVHVKKVRFPDNTIQVVLELYASFHGNDEFWYSNPPYSYIRMNNLTTARGNGAYREVFVTIDGKFVGSEVVFPVVFTGGINPLFWEPIVAIGDFNLPSYDLDLTPFLGWLLDGKYHDIAXGVDDAISFWLVN

SEQ ID NO: 117504 - protein, 168 aa, Gossypium hirsutum
  unsure (1)..(168): unsure at all Xaa locations
  Clone ID: AI726726.1.pep
MALWFCSARFLVFLFIVSALPIAYIISQERAKTDHHVFHYHSSGFFRECAKWDDQGRRFLVSFLEGGVGEIHVPQNYTPDVVLQEVTVVKDSDLTGNASNGIALDRPKNRLLVAVXDVLGNRYSGLAAYDLSTWKRLFLTKLSGPGDEKSMADDVAVDADGNAYVTDV

SEQ ID NO: 117505 - protein, 169 aa, Gossypium hirsutum
  unsure (1)..(169): unsure at all Xaa locations
  Clone ID: AI726722.1.pep
EIENPEDVLINNSWFLTNQFLLEVIFHNKMKRYECLTNDSSIASAIYVPFYAGLDMSLYLWGFNTTVRDSASLGLVKWLSEKPEWKRMWGRDHFLXAGRIAWDFRRQSDNETDWGSKLRFLPESKNMSMLSIESSSWNNDYAIPYPTCFHPSKDSEIFRWQDRIKRQNR

SEQ ID NO: 117506 - protein, 99 aa, Gossypium hirsutum
  Clone ID: AI726717.1.pep
LRGTNGPLQSGCILKNTRFKLLSERIPYYQGTCHGGPMLGKFMIHATLYTQVSAPLFFYLMGILFFFGLILRLRSTLFSLFTFWFCLTPWKYYGSPILV

SEQ ID NO: 117507 - protein, 156 aa, Gossypium hirsutum
  Clone ID: AI726707.1.pep
ALKSGLAPNVSDAHTINGHPGPISSCPSQRGFTLAVENGKTYLLRLINAALNEELFFKIAGHKLTVVEVDATYVKPFKIDTVVIAPGQTTNVLLSADQSSGKYLVAASPFMDAPVAVDNLTATATVHYSGTLANTPTTLTAPPPKNATAVANKFIN

SEQ ID NO: 117508 - protein, 129 aa, Gossypium hirsutum
  Clone ID: AI726683.1.pep
MGFDLFSFIFIIFSWASFLSMKAEAEAEAEGIKSARLLDLLIRDYTVKSLDRDLRTGIVHTVTLPANFSGIKVDTVRFRCGSLHRYGAQVKEFHLGSGVIVQPCAERVMVVRQNLGYNWSSIYYANYDL

SEQ ID NO: 117509 - protein, 163 aa, Gossypium hirsutum
  unsure (1)..(163): unsure at all Xaa locations
  Clone ID: AI726676.1.pep
MACIRRLRYLAQIYIKSNRISEAENIERKVLHIMELSKGWNSLDTVXAAEGLGLTLQSSGSLKEAQELLERCLDARKTLLPEDHIQIGANMLHIARVVMLNYNQLRGMHVSDAIAELDKAKGLLNNAIRITRKVIXKSKTQNKKQGYGVSGETRRDGYAVIIL

SEQ ID NO: 117510 - protein, 159 aa, Gossypium hirsutum
  Clone ID: AI726657.1.pep
CSFSNGEYVKAGLAELEQWCNEATEEYAGLAWDELKHIRQAIGFLVIHQKPKKTLNEITKELCPVLSIQQLYRISTMYWDDKYGTHSVSSDVIANMRVMMTEDTNDAVSSSFLLEDDSSIPFTVDDISKSLQQIDIADIDPPALIRENSGFGFLLPRSE

SEQ ID NO: 117511 - protein, 146 aa, Gossypium hirsutum
  unsure (1)..(146): unsure at all Xaa locations
  Clone ID: AI726612.1.pep
MGAYRADDDYDYLFKVVLIGDSGVGKSNLLSRFTKNEFSLESKSTIGVEFATRSIRVDDKVVKAQIWDTVGQERYRAITSAYYRGAVGALLVYDVTRHVTFENVKRWLXELKGHTDANIVIMLVGNKADLRHLRAVSTDDAKAFAD

SEQ ID NO: 117512 - protein, 243 aa, Gossypium hirsutum
  unsure (1)..(243): unsure at all Xaa locations
  Clone ID: AI726558.1.pep
MATSLIRRAMNMASRVSSPTVAPASRMVVVRPYASETEAQKVEPKAAASPNMKTFQIYRWNPDNPTKPQLQDYRIDLKECGPMVLDALIKIKNEIDPSLTFRRSCREGICGSCAMNINGCNGLXCLTKIESGSSETTITPLPHTFVIKDLVVDMTNFYNQYKSIEPWLKRINPPPTAGXEIPQSXKDKAKLDGMYECXLCACCXTSCPXYWWNPESYLGPAALLHANRWNSDSRDXYXXERLE

SEQ ID NO: 117513 - protein, 243 aa, Gossypium hirsutum
  unsure (1)..(243): unsure at all Xaa locations
  Clone ID: AI726535.1.pep
MKAVVITTAGGPKVLQLQQVNDPQIKHHEILIKVEATALNRADTFQRNGSYPPPKGASPYLGLECSGTIQAVGKDVSRWKVGHQVCALLNGRGYAEKVAVHGGHVLPIPPGVSLKDAAGLPEVACTVWSTVLMMSRLSAGETFLVHARSIGIGTFAIHIPNTKGATLLVTARSDKHLAFCKTPGADVCLHFHRDDFVAPPHEHPAGXGVHVILDCLRTSYPPPHLNTLFRMKASTIASTVDHP

SEQ ID NO: 117514 - protein, 79 aa, Gossypium hirsutum
  Clone ID: AI726460.1.pep
EGGRGEGEEREKEKRGGGERGKGERGEGREGRSERGEKERREGRERVRDRNKEREKEERMSKESREKRREYRKYRRNSI

SEQ ID NO: 117515 - protein, 105 aa, Gossypium hirsutum
  unsure (1)..(105): unsure at all Xaa locations
  Clone ID: AI726417.1.pep
MAYRRRQQQQQQQQGILTSSSSSSADVDADDLVDVEVNAAKAIRASSAHKDSSFSSAYGYGPLHSSSASPLSAPKDSRSHQYESMKSLNESKQGFWGSLAXXAKS

SEQ ID NO: 117516 - protein, 183 aa, Gossypium hirsutum
  Clone ID: AI726414.1.pep
MKKVELIFVPTPGIGHLVSTVEFAKLLIDHNDRIRVTILSMKWFPDAALDAYTKSLTALPPDGIQLIDLPRVDPPSLAPWKSAESIIDSFIKCYIPPVRNAVRDIVSMKCSSDETRVAGLVLDLFCSPMVDIATDFDLPSYIFITSNAAFLGLMFYLPTRHSLNSSEFQSSDPEHVIPGFVCP

SEQ ID NO: 117517 - protein, 189 aa, Gossypium hirsutum
  Clone ID: AI726412.1.pep
EDFIVRANTGEEGEGDESGKKLNFVEEFEFIDASVKNADTKSGNQEIANEVRNYQGEEKPRSRRLLDEQFDILELKEYGSDDDDDDCEGYMAEEKEFLADKLKNVLNENDMDDLEHDDVYKAPADLLHGSKSPKSKELTADIMRRCAEYAENYENESEDEKVMVVQESSDESEQFDCESIISTYSTLDN

SEQ ID NO: 117518 - protein, 154 aa, Gossypium hirsutum
  unsure (1)..(154): unsure at all Xaa locations
  Clone ID: AI726401.1.pep
XXXXXXPSPHHPKXXXXFGPXTPHXHPTPPTQAHHTTGQDACDAQHAHPGAHARARAAGIQPHNLPLVAPHAPPPIPGSRSHPHSIPNPQHFCAAPPPSXPSPALPHPPPPPHHLPAHHPSPTPRNALSHPTSRLPPTTSTSLTCSAHLAPRSA

SEQ ID NO: 117519 - protein, 91 aa, Gossypium hirsutum
  Clone ID: AI726400.1.pep
FILYDCYLFFSSYLSYYTICIHTCLLTTYHDLSIFNLHYSLLSSSILTPFSLSLLYYFLYFSINSYLLNNPLIFILRSILFYRLLLNLFTL

SEQ ID NO: 117520 - protein, 140 aa, Gossypium hirsutum
  unsure (1)..(140): unsure at all Xaa locations
  Clone ID: AI726389.1.pep
MSSTVSTKGGXXGKPKSSKSVSRSQKAGLQFPVGRIARFLKAGKYADRVGAGAPVYLSAVLEYLAAEVLELAGNAARDNKKNRIVPRHIQLAVRNDEKLSKLLGTATIANGGVLPNIHQNLLPKKIGKGKGDIGSASQKF

SEQ ID NO: 117521 - protein, 38 aa, Gossypium hirsutum
  Clone ID: AI726364.1.pep
RGLVQVLGYGWAGLLRKYVVEPAHMWWPSTLVQVSLFR

SEQ ID NO: 117522 - protein, 183 aa, Gossypium hirsutum
  unsure (1)..(183): unsure at all Xaa locations
  Clone ID: AI726354.1.pep
MYRKILMRMRMRMMNATRKVVGWAKEYKRYLSTTTTNQILLSPPLVSVDLPEIWGSTSTLYHHHPSQSPVSHAKIINGKSIAEEITSRVASNVKRMKESIGKVPGLAVILVGQRKDSLTYVRNKIKACEEAGIKSVVAEFPDSCAEEDIMTSLSKFNEDPSXHGILVQLPLPEHLDEEKILTL

SEQ ID NO: 117523 - protein, 205 aa, Gossypium hirsutum
  unsure (1)..(205): unsure at all Xaa locations
  Clone ID: AI726346.1.pep
QSKGSNSKVSNMVFRTRISSLLISMFAIFASFYVAGRLWQDAQNRVYLIKELDRVTGLGQSAISVDDTLKIVACREQHKTLSALEMDLAIARQEGFTSKRSSDTXGAVSKRKPLVVIGVLTRFGRKNNRDAIRKAWMGSGETLKKMEKEKGVVSRFVIGRSADREDNLNXSIDDXNXQTNDFIILDQVEAPGEXSKKIQMFFALA

SEQ ID NO: 117524 - protein, 228 aa, Gossypium hirsutum
  unsure (1)..(228): unsure at all Xaa locations
  Clone ID: AI726319.1.pep
IIRNNETMHKAGQLEVQILKKLAGADPDDKRHCVRFLSSFKYRNHLCLVFESLHMNLREVLKKFGRNIGLKLTAVRAYAKQLFIALKHLKNCGVLHCDIKPDNMLVNEAKNVLKLCDFGNAMFAGKNEITPYLVSRFYRAPEIILGLPYDHPMDIWSVGCCLYELYTGKVLFPGPTNNDMLRLHMELXGPFPKKMLRKGAFTEQHFDQDLNFHATEKDPXTXKSIKKE

SEQ ID NO: 117525 - protein, 228 aa, Gossypium hirsutum
  unsure (1)..(228): unsure at all Xaa locations
  Clone ID: AI726315.1.pep
NDENCWFLEVGAKVRVRVSTEMQLKMFGDQKRVDFVDKAVWALKFLSDEEYRNFVTQFQNCLFENVYGMEASEENKVKVCGKEFIGWMKPEVADDSMWEDADDLSSGSIPVKGNRELMEEFEEAANGGVQSLALGALDNIFLVNDLGVQVYXNFNRGIHGXGICVKFDAGGSRIGGSPSSSTPKKALLMKAXRNMMLMNSKKXKXTNATGLXQVDIXTGKIVXELEFR

SEQ ID NO: 117526 - protein, 169 aa, Gossypium hirsutum
  unsure (1)..(169): unsure at all Xaa locations
  Clone ID: AI726314.1.pep
HHGMQVNRGLLSSGIMASYVVFLCWSAIRSEPVDEKCNVQKPDNRKFDWTTVLGFLIAIGAIVMATFSTGIDSKSFQFNKNNVKLEDDIRYNYGFFHMIFSLGAMYFAMLFISWNLKDSATEWSIDVGWASAGVKIINEWVAATIYTWKLVXPVVKQYRVLNNEQTMQP

SEQ ID NO: 117527 - protein, 182 aa, Gossypium hirsutum
  unsure (1)..(182): unsure at all Xaa locations
  Clone ID: AI726242.1.pep
MAIPLNIGFKMPLLGLRVWHMDGKDVRYLIINSITLGYRHFHCAADYENEAEVGDALSEPXKPGLSCKHDLFIXTGLWNSDHWHVLDACIYNLNKLXLDYLDLYLVHCPVALVHTGVCLTGCPLDYDGVLDIYTTISLDTTWHAIEHLVSXGLVRXIGICXYDILFTTDCLAYSSVEPAVYH

SEQ ID NO: 117528 - protein, 214 aa, Gossypium hirsutum
  unsure (1)..(214): unsure at all Xaa locations
  Clone ID: AI726239.1.pep
EPSTSYSRTSQERLLPSSDSAASLFLVYQENPLFVDDKNELDNQLTVLDSVGEKLINLSANSTSSVKNNDKSIFWIPQNHNDEKPCKTRSGRNIVIPPSSRTLLDKFSQYDQDAKEGRLVNTDYMVNSNIRDAVALGRASSVPPPLCSFCQHKAPVFGKPPRRFSYEELEEATDGFAEVNFLAEGGFGVVYXGILRNGQVVXVKLLXXVGCQAD

SEQ ID NO: 117529 - protein, 88 aa, Gossypium hirsutum
  Clone ID: AI726230.1.pep
TRTPRLWLPTYDDKNTVFSKIEQEVEIFSGSSERYGTIYMKSATICLEKGADYPNNEIYRLQSILDQSISPAKADEFTLMNNILSTSM

SEQ ID NO: 117530 - protein, 152 aa, Gossypium hirsutum
  unsure (1)..(152): unsure at all Xaa locations
  Clone ID: AI726225.1.pep
MASKIFQWHFTILNHTNMIHSHIRGLFLLLIFFSLLFLITTLFLCAHWVYSHCLLSTADAMANATPPGSSLGLDPNAINNLPIILHTKGEETECCICLXVFEDEKMVKVLPQCNHVYHSQCVDKWLGSQSSCPLCKACLNPFTSPLLTRTRL

SEQ ID NO: 117531 - protein, 477 aa, Gossypium hirsutum
  unsure (1)..(477): unsure at all Xaa locations
  Clone ID: AI726212.1.pep
TTTQKNEREKGEARXEEEVRQREDTETAGERRRREXKRERVEEKMKDEXRNKREEREKRTQRGEKREEEEEERREERKREEEGKRXVEKERREGREDEEERVRERREREREERERERGEGRGRRRRREQGERTVREEEGRKRREEERKEEEKRSGKEGEEERGKGRGEEEEKEGGKRGRRREKEGRRRRREKEGRRGEEEKREERGRERKEESGTEERQRGRERERGGRKEARRRRRRDNREEEREERGEKRRRTRSGGRXKREARQRQRESTRDEEGRRRREEREHESRRRGEKRVRREHERSKRRRKSTRAHAKKRRXEERRVAGEREDGRQEQRQRREERRRREREKGXRQRRRRAGEQRSEEQKKRAQRERRERRRRNESSKTAGSRESNAGERARDREQRERRXAESSREESERRRRRTESIEAGQSKREGEQEEDEKRERQEREETKREEETGGTNETQRRAEKKRHGSRR

SEQ ID NO: 117532 - protein, 128 aa, Gossypium hirsutum
  unsure (1)..(128): unsure at all Xaa locations
  Clone ID: AI726207.1.pep
CKILEYIKMPLSTTXIGSYLSVETSPLLGTTIVNNCTLWIVDDYHHVCCQAPEPLSNCINHLRFRHMINNVVLILTGTLHERDVHYLLDNCHPFGISDNIAPLAAAHNLRELYSLVLVHTPLAPYFSE

SEQ ID NO: 117533 - protein, 76 aa, Gossypium hirsutum
  Clone ID: AI726199.1.pep
GRVDAEFAVNEYNRLSSSSLVLQKVVKGETQVVAGINYRLVLKAKNGSVAKKYQAVVWEKSWLNFRNLTSFTLVKG

SEQ ID NO: 117534 - protein, 91 aa, Gossypium hirsutum
  Clone ID: AI726179.1.pep
RPRRPQAIICDRNKTIRDTKNSPDPQVPRSKLITSPFYITSPQISHPQTTDGEKSQHTSHNMTHNKLQQCYPYGSLTHTQTHNMNIGYTIW

SEQ ID NO: 117535 - protein, 88 aa, Gossypium hirsutum
  Clone ID: AI726173.1.pep
HLIHSFFYHCLLLINTRKVDKRSNKKRFKLEAWWLMEESFEENVKISWGLSSGNLLQKLDMLKDELQKWAKKRRLERLWRKDFLTVSF

SEQ ID NO: 117536 - protein, 135 aa, Gossypium hirsutum
  unsure (1)..(135): unsure at all Xaa locations
  Clone ID: AI726141.1.pep
KKKKKKKKKKKKKIFPRPPPRETPIPPIFIFFYPPPWPPFLQLLNGKNPAFPQFNPLEKIPPSPSGFYKKKAPPIPPXPNFPPPNWKLEPPFFRPFNPGGFVVYPHFIPPFSNRPTPPPFPFSPPLPPHFPGFPP

SEQ ID NO: 117537 - protein, 185 aa, Gossypium hirsutum
  unsure (1)..(185): unsure at all Xaa locations
  Clone ID: AI726130.1.pep
MFFLDWIYGILASLGLWQKEAKILFLGLDNAGKTTLLHMLKDERLVQHQPTQHPTSEELSIGKIKFKAFDLGGHHIARRVWKDYYANVDAVVFLVDSYDKERFAESKRELDALLSDEALASVXFLILGNKIDIPYAASEDELRYHLGLNNFTTGKGKVNLGDSSVRPLEVFMCSIVRKMGYGDRF

SEQ ID NO: 117538 - protein, 125 aa, Gossypium hirsutum
  Clone ID: AI726079.1.pep
GAVGNKQMEWLDNVLKDATNMTQKVIICCHVPLDPGATSKTTFLWNYDQVMDLIHQYDCVKVCLSGHNHQGGYSVDSRGVHHRVLDAALECPPGTNAFGYIDVYDNMLSLVGTDRMKSTDFCFDF

SEQ ID NO: 117539 - protein, 217 aa, Gossypium hirsutum
  Clone ID: AI726076.1.pep
QDDLLYAFSALNRDLNFIEHTSDLGWKLDKRAMPLIIDPGLYLSTKTEVVWASQKRKLPTAFKLFTGSAWTVLSRPFIEFIIMGWDNLPKTLLMYYTNFISSPEGYFQTVLCNVPEFAKTVVNHDMHFIKWENPPKQHPHILSLNELGKMIMSNAAFARKCNQDDPVLDKIDADLLGRVNVSFTPGAWCSGKLKCSEVGDFDNITPGPGTPKAPSSL

SEQ ID NO: 117540 - protein, 311 aa, Gossypium hirsutum
  unsure (1)..(311): unsure at all Xaa locations
  Clone ID: AI726070.1.pep
EAHHKETDRRNNARTEDTKAHPPDGQHKDESKGADRRDGRKRRNEEREHAEEAAPRTPPRQRRNQKAQAETNRGRSRRTPGTRRGTPRKKKTRDRQRRTHGRARRARPKARDRRATKTRGRRRGGKRQSRREKKKAGEAGKEHGGRRTRQRREERERPQTPGRREAREEGQEREPHEGRRXKETQEERERRKEKENXKRATKDRXDAREDQQKTQETRRDEKQKQKPRPRXKTQARRNENTEERKAHSARPERRRGKRGDEGSPMXQARKQGXKXXXDXQRVLRARITIYKLIRYQYGIRGGTMTKTGERQ

SEQ ID NO: 117541 - protein, 211 aa, Gossypium hirsutum
  unsure (1)..(211): unsure at all Xaa locations
  Clone ID: AI726058.1.pep
YSADDSSYEAVNDKITARDNLVFLQNWFLKFPQYKNRSLFITGESYAGHYIPQLAELMHQFNKKEKLFNLKGIALGNPVLEFATDFNSRAEFFWSHGLISDSTYKLFTTSCNYSRYVSEYYRGNVSPICSRVMGQVSTETSKFVDKYDVTLDVCISSVLSQSKILTTQQVGDTIDVCVEDXTVNYLNRQDVQKALHARLVXVHKWAVCXXV

SEQ ID NO: 117542 - protein, 206 aa, Gossypium hirsutum
  unsure (1)..(206): unsure at all Xaa locations
  Clone ID: AI726056.1.pep
LELKPKKDFDVIREKEVEEFERNRSITTSNSSNAEEKYPKGLLVAFKLKSASAGDSAEQNGSDEKKTAENENDKEKVDDKHGSPIDKVVEKENKSSISIYKDDMNVVLREDLKDVFEKFGTVKYVDFRIREDKGYIRFEQPEAAQKAHAASASAKGGLVVKNFIANVKPVTGVAXSEYWSLLRDNQGKQRVGNHFWGKNWKKPGWI

SEQ ID NO: 117543 - protein, 116 aa, Gossypium hirsutum
  Clone ID: AI726048.1.pep
LAEFVKKRDKRVIDMSVKRKEEMERKKEEERETKRKLEKERLARVKAYQEPEWAKVQEEEVDNWDEMDEKEREKEEFYCVACGKKFKSEKQWKNHEQSKKHKEKVAELRESFIEEE

SEQ ID NO: 117544 - protein, 150 aa, Gossypium hirsutum
  unsure (1)..(150): unsure at all Xaa locations
  Clone ID: AI726044.1.pep
LVSSEGGCNYKAVKRWTSQRKLGYCLFDCDKIFVPIHKDIHWCLAVINKKDRKFQYLDSLRGRDGKVLNALANYFVEEVRDKSGXDIDXSSWEQEHVEDLPAQKNGFDCGMFMLKYIDFYSRGLSLXFGQEHMRYFRSRTAKEILKLRSD

SEQ ID NO: 117545 - protein, 112 aa, Gossypium hirsutum
  unsure (1)..(112): unsure at all Xaa locations
  Clone ID: AI726031.1.pep
SVESLILHSCFFNSQSSLTGESWPTEKTADAREDRSTPLLELKNICFMGTNVVSGTGTGLXVSTGSKTYISAVCSTIGKHKPADSFEKGIRHIXYLLVGVMLLIITIQILVE

SEQ ID NO: 117546 - protein, 110 aa, Gossypium hirsutum
  Clone ID: AI726028.1.pep
RKNVKLAEKAAQPLFRLEPWNAGNCVILSNIYASRGQWDGVAKLRKMMKGGQITKAAGYSFIEEGGEMHKFLVEDKSHPRCDEIYETLHRISIVMKLQNKLIDFRSELTV

SEQ ID NO: 117547 - protein, 273 aa, Gossypium hirsutum
  unsure (1)..(273): unsure at all Xaa locations
  Clone ID: AI726006.1.pep
NILPANAASTSPFSFNLQLSQFFRFKNRALTLLSKDKELQNYLPAEDDFNKALYIFDIGQNDLDGVFYFPASDEQVVAFISKLMSELNYGMKRLYDAGARNFWVHNTGPLGCLPRIIATFGKKPSNLDEHGCVASHNRAATVFNKKLHDMCLQFLAHSPEANITYVDIFSIKLNLISNYSLYGFQQPLSACCGYGGAPLNFDTKIACGVTKDLNRSIVDSNPCYNTAEYINWEWTPYTVSCQXIVAQLILTGNYSESPHLKNSHFLTETIHWF

SEQ ID NO: 117548 - protein, 181 aa, Gossypium hirsutum
  Clone ID: AI726001.1.pep
MRATARGRPTESFHPPVAQQSRDSDASFASSRPSSVAIGRAVSAVEPYAERSFQVATTRSINAFFSTHSIPPISTKPSQAPSAKELLNILTSLLSLLGFPCSKVEDELGFLLKSLNCPFKFNKSTLRAPNTHHNWPNWLGIVHWLVQLAIYNEHLCQNSISSFAQNNSMTEYALECYKRFK

SEQ ID NO: 117549 - protein, 173 aa, Gossypium hirsutum
  Clone ID: AI725983.1.pep
APPYFSDSNDETSSSMALNTVARKTLWPPLAFGKSVMTWYEHVGRFFCFLICKNHTTWERIFKLFTQTRELNFMVVDLTRHTHHSAWHSMHNVICGGSKFMDDYVGILINAKVKVWVIHGDQDLTVPLDCSNNLKMKFPQLKLIIVQNVDHGTVIFHRKRDFVKSLQHIWATS

SEQ ID NO: 117550 - protein, 213 aa, Gossypium hirsutum
  Clone ID: AI725967.1.pep
SHNGFTGSIRVINSTTLKVLKLSSNQLSGDLPSSLRSCEMVDLSNNMISGDVSVMSNWEASLVDLDLSSNKLSGSLSNLPHFEDLNTFNLRNNSLVGALPSLLDTSPILSVVELSLNQLSGHIPGSFFTSTTLKSLNLSGNHLTGPIPLQGSRVSELLVMSTYPQMESLDLSNNSLTGGLPSEIGNIPRLKLLNLAGNELSGQLPIELSKLSE

SEQ ID NO: 117551 - protein, 265 aa, Gossypium hirsutum
  unsure (1)..(265): unsure at all Xaa locations
  Clone ID: AI725900.1.pep
ISKFWVESKKLWLIAGPSIFSRLAMFSMTTITQSFAGHLGDLNLAAISIATTVIICITFGFLLGMAXALKTLCGQAYGAKQYQMLGLYLQRSWIVLFICSILLLPLFIFAAPLLKFMGQPTDVADQTGLVAIWLIPFHLSLPFQFTLQRFLQSQLKTAVIAWVCGVALAVHALISWIFVYXLXFGIVGTPLHLEFSWWXLFXGSLVYVVXGGCPLSWNGFPTRLSLNFGIRQIXLASGVMILLENIYTEHYHIFWILPNTKTALI

SEQ ID NO: 117552 - protein, 75 aa, Gossypium hirsutum
  Clone ID: AI725893.1.pep
GNESKMLPLWRQAEPKFLWNSYMLEALIDKKLDPYLLPVVQGSFHNFQATIGKEIVDVTLIARRCTRRNGTQSWK

SEQ ID NO: 117553 - protein, 226 aa, Gossypium hirsutum
  Clone ID: AI725870.1.pep
LFDVRCAVDLLNRMAHDALETLCEITQKIRESIRYVKSSKATQATFNELADEVQVETKKCLCIDNPLKWNSTYLMLEAASEYRKVFSCLRDRDPVNMKFLLSDPEWDRLITVTSFLKLFVEVTNVFTRSKYPTANIFFPEICDIHLQLIEWCKNPDEYISSLALKMRKKFEEYWYKCSSGLGIAAMLNPRFKMKLWEYYYPQLYGDSATDLIEECVQCFKSLLHKL

SEQ ID NO: 117554 - protein, 59 aa, Gossypium hirsutum
  Clone ID: AI725851.1.pep
GNFNLDFGNLPKEESLLRILWFFLRGLFYLLFIFFFFFFFFFFFFFFFFFFFFFFFFGK

SEQ ID NO: 117555 - protein, 204 aa, Gossypium hirsutum
  unsure (1)..(204): unsure at all Xaa locations
  Clone ID: AI725835.1.pep
LHIVTPLISLELLKYPKLCHDYFSLLSHIVEVYPETLAQLNSEAFAHIIGTLDFGLHHQDLKVVSMCLGALKALAAYNYREICAGKTGLVSAGHGNSPEGIFSQFLRSLLQLLLFEDYSPDLVSAAADALLPLILCEQGLYQKLGNELIERQTNPALKSRLANALHSLTSSNHLASRLDRVXYQRFXKNLNSFLVKIRGFLRTI

SEQ ID NO: 117556 - protein, 211 aa, Gossypium hirsutum
  unsure (1)..(211): unsure at all Xaa locations
  Clone ID: AI725833.1.pep
MYSSLNTNGNAAAFETGPVSGRFAAVYSEVQNSRIDHALPLPSVLRNPFKVVEGPPSSAAGNPDEIAKLFPNLFGQPSAMLVPNEADSLRSDLKLKIGVVLSGGQAPGGHNVISGIFDYLQDRAKGXILYGFKGSPAGIMKCKYIELNADYIYPYRNQGGFDMICXGRDKIETXEQFKQAEETAVKLDLDGLVVIGGDDSNTNACLLAENF

SEQ ID NO: 117557 - protein, 202 aa, Gossypium hirsutum
  unsure (1)..(202): unsure at all Xaa locations
  Clone ID: AI725812.1.pep
MEMSHIWLAFGVLALLLASAPADDFLVLTDYHFQNEFRRNRXPLLQFYSPWCGPCQKLAPEYDKLGSRFRNALSLFIGHVECDDHSSVCSKYCVHGYPPTHWFLHCSLEPFTXLTTPTAKALAHFVVPKXWTTVTIPPLPSIVLLLNSYDFDQVVRDETKDVXVDFHAPWCRLPQNLAPPSENVPFAFIMEEYVLFPHLDAD

SEQ ID NO: 117558 - protein, 59 aa, Gossypium hirsutum
  Clone ID: AI725808.1.pep
DDLKRLASIGVSLDSKDSQGRTALHMAAANGHLDIVEYLIGRGVVRKLSYEYFLWLFNT

SEQ ID NO: 117559 - protein, 189 aa, Gossypium hirsutum
  unsure (1)..(189): unsure at all Xaa locations
  Clone ID: AI725788.1.pep
MEEQVDSDRQLMMEGGFTAPHSMDIDPSRERFPCCIVWAPLPVLSWLVPFIGHVGICREDGIILDFAGPNFVCVDHFTFGPVARYLQINKDKECGISPHSSALKGDEEYHDDELRRQTLTWDEALRKSTMEFQHRSYNLFTCHXPSFVANNLNKLRFRYRGWTVXNVALLLLLKGHWVSQLTFFRSFMP

SEQ ID NO: 117560 - protein, 175 aa, Gossypium hirsutum
  unsure (1)..(175): unsure at all Xaa locations
  Clone ID: AI725768.1.pep
FYKALKARKMLVKILQGVLDERRVNDPNGKKGMIDLLMEIEDENGQKLPDEDIIDLLLMFLLAGHESSAHVAMWAILYLHNNPEILKKAKEEQEEILKNRQSTEKGLTLKDIXEMYYLQKVIDETLRKASVSFCNFREAKVDVNIHGYLIPKGWNVLVWNKGVHMDPQVYSNPQE

SEQ ID NO: 117561 - protein, 102 aa, Gossypium hirsutum
  Clone ID: AI725765.1.pep
MNSCVMGAEEIKKDMDITSWPSDLAYEQWVSLPVSGARPSARYKHAAAVADENLYITGGSRNGRYLSDIQAFDLKNLTWSSLKLEIDPSADKSEESGFKEVL

SEQ ID NO: 117562 - protein, 192 aa, Gossypium hirsutum
  unsure (1)..(192): unsure at all Xaa locations
  Clone ID: AI725752.1.pep
VDVKFSDVAGLGKIRLELEEIVKFFTHGEMYRRRGVRIPGGILLCGPPGVGKTLLPKAVAGEAGVNFFSISASQFVEIYVGVGASRVRXLYQEAKENAPSVVFIDELDAVGRERGLIKGSGGQKRDATLNXLLVCLDGFEGRGNVITIASTNRPDILDPALVRPERFDRXIFIPKPGLIGRMEILQVHARKN

SEQ ID NO: 117563 - protein, 192 aa, Gossypium hirsutum
  Clone ID: AI725750.1.pep
GKHEDAALVVYSIISHGMEPNAVTYNTLIHSLCNHGYWNEVDEILAIMKETLHPPTVVTYNILINGLCKYGLLDRAIKFFDQMVSQNCSPDIVTYNTLLGALSKEGMAEEALQLLQFLSGSSCSPGLITYNTVIDGFTKTGDMKKAMELYNRMSEEGISPDDITHRCLFWGFCRSNQLKRAVGILKVMVEQN

SEQ ID NO: 117564 - protein, 192 aa, Gossypium hirsutum
  Clone ID: AI725748.1.pep
SLITMYAKCGDLQSSECIFDGLLNKNTISWNAIIAANAHHGLEEEVLKCIVKMKNAGIDLDQFSFSEGLAAAAKLAVLEEGQQLHCLAVKHGLDLDPFVTNAAMDMYGKCAEMDDMLRILPQPLNRSRLSWNILISAFARHGYFQKARETFNEMLEMGLKPDHVTFVSLLSACIHRGLVEESLTYYAAMSKY

SEQ ID NO: 117565 - protein, 151 aa, Gossypium hirsutum
  Clone ID: AI725741.1.pep
KTQIFFNGSKPRKASSSLNDTVSRLSRYPDSKLHVPKEVQAPVKHLKFGLSIPNPNPNHDFLSKKLSNAKKQAFGSFKYINKDKEVVTVEEDDEHSGSWLMADAFDKLSLNHSDNDSKAYNKLLKSAERRTIKLKDSGPQVKVVTHELFVP

SEQ ID NO: 117566 - protein, 194 aa, Gossypium hirsutum
  Clone ID: AI725739.1.pep
ETEGSTDGSDGNTTGTDQSRRKRSREGTPTIAGGDGKTEAKSNAVAVAEVTTTISPKPIGTVLSPGMTTALELRNPSSMNAKSSPTNVPCGVMPPEVWMQNERELKRERRKQSNKESAKRSRLRKQAETEELARKVESLTAENATLRSEINQLTEKSEKLRLKNATLVEGLKNAQLGHTQENITNKNKNEGEMY

SEQ ID NO: 117567 - protein, 195 aa, Gossypium hirsutum
  unsure (1)..(195): unsure at all Xaa locations
  Clone ID: AI725735.1.pep
TPFRKLVIMGLDRLKRGRGPVVVKTVAGTVFVVMVSSVYSMMEIQKRWVGDDGPVSSTDXVLMVRHLLEATLMGATIFLALMIDRLHHYIRELRIRRKTMDAVKKQGQGSNDKKPDGFDKVKSLEEEVMTLREKLKQLESDMEAKTKQINAAEVNTVALRKQSEGLLLEYDRLLEENESLRGQLQSLDREIFTFG

SEQ ID NO: 117568 - protein, 192 aa, Gossypium hirsutum
  unsure (1)..(192): unsure at all Xaa locations
  Clone ID: AI725721.1.pep
MSWLSRSIVNSLKLDEDDDDRTDAAPNPKVEPDLDPDQSSPSHSYPSPDPNTPRGVKEDISELTKTLTRQFWGVASFLAPPPLGSSNQQLDHTENEQSLRPPSDGWDEASDEALISGIRSDLSEIGGKFKTXISXLSKNIAVSEFTKMASNFLHLGSDEKILDKYESGNVVGVTEDVVAFARDIAMHPRTGL

SEQ ID NO: 117569 - protein, 193 aa, Gossypium hirsutum
  unsure (1)..(193): unsure at all Xaa locations
  Clone ID: AI725713.1.pep
TVHSSPYLQMDNPAIMSLLRPTPGEKHRKSSSGGLLRMFKLFPMLTSGCKMVALLGRPKKPLLKDSATTGTIFGYRKGRVCLAIQDDPHCVPMFVIELPMLTSLLQKEMASDIVRIALESETKTHKKILLEKFVWAVYCNGRKXGYSIRKKQLSDDELHVMQLLRGVSMGAGVLPSPNDKETVTSDGELTYMR

SEQ ID NO: 117570 - protein, 192 aa, Gossypium hirsutum
  unsure (1)..(192): unsure at all Xaa locations
  Clone ID: AI725705.1.pep
DRIFEGVCRPFKVRVEQVLQSQPSLIISYKLSNTLEFYSYTISDLLGRETSLCNTLWALKDAAQKTFFEILKSRGEKLLRYPPLVAVDLSPAPAVREGVSVLLEIIGTYNSMMGPGSGKKPTFESGNSCXLDPFIHMCEQAADAHKSKGAGHSSRRIRMIPDSGHLSKSAVDAILSINNSATFSQVNKNTEA

SEQ ID NO: 117571 - protein, 184 aa, Gossypium hirsutum
  Clone ID: AI725701.1.pep
ENTLNYGLDTFWAIGYMKGSRRIVIGYDEGTIMVKIGREVPVPSMDNTGKIIWAIHNELPTVNITSVGPHFDVSDGHRLPLAVNELGTCDLSPQSLNHPPHGRSVVVCGHRDYTIYPALAWKNTSPGSASQSVSSSQGHYAAPEIPSPHHNFPHQFPLIEGLSLLHPPPQRYLGGFSYSPTSSP

SEQ ID NO: 117572 - protein, 186 aa, Gossypium hirsutum
  unsure (1)..(186): unsure at all Xaa locations
  Clone ID: AI725700.1.pep
IFKADIGVKNGCIVGLGKAGNPNTMDGVSENMTIGINTEVIAGEGLIVTAGAIDCHVHFICPQLVHEAISSGITTLLGGGTGPXDGTRATTCTPAPSQMKMMLQSTDDFPLNFGFTGKGNGSKPEKIHEIIKAGAMGLKLHEDWGTTPAAINSCLAVAKLYDIQVNIHTDTLNESGFVEQTINAFK

SEQ ID NO: 117573 - protein, 91 aa, Gossypium hirsutum
  unsure (1)..(91): unsure at all Xaa locations
  Clone ID: AI725689.1.pep
GEEEEKIEVALYQRFSKVKILELKDDNYFHDTDASMVNALRCIKITEVPTIXIGLVEIEVKSSVLNDKFIVHRLDLISLTSQCTMSVFTFS

SEQ ID NO: 117574 - protein, 186 aa, Gossypium hirsutum
  unsure (1)..(186): unsure at all Xaa locations
  Clone ID: AI725685.1.pep
MAESIKKMAGDSTTEFPSPSPNKRLKTLSKSIIEDEPGNHQPEQQRQQQAADDDDSDPEICGICLSDGGRRAIRGKINSCDHFFCFVCIMEWAKVESRCPMCKRRFTIIHKPPKEGVFASQRLVNIPQRNQXVNISLENANSGPSDPYSKFKCTVCNGMTDENLLLLCDLCDSAAHKYCVGLGGNG

SEQ ID NO: 117575 - protein, 113 aa, Gossypium hirsutum
  Clone ID: AI725663.1.pep
HAAMSNDPFISNLTKPLKEKFDRYWSDCFLVLAIAVVMDPKFKMKLVEFSFSRIYGDDAGMWIKIVDDGIHELYLEYIAQALPPPETFVEERNGSIIPKQNGGVILKTEPPPN

SEQ ID NO: 117576 - protein, 205 aa, Gossypium hirsutum
  Clone ID: AI725662.1.pep
GNRRDKVEGGEAPQMTEPRRLRGHKATATCCIASRDKPGLVATSGEDGCICWFDMRCKDVKFVMDVSNEPISSLCFNSGNENIIYVSTGNEVKSFDVHMLADNSWKPLESYNYNKEEINQVTCNSRSSFLASADDGGEIKIIDIHQKRIFKNLRTGHTSICSHVQFNPWETWEIVTGGLDFKFIIWELSKGRSSQIVGFWAGPTC

SEQ ID NO: 117577 - protein, 131 aa, Gossypium hirsutum
  Clone ID: AI725653.1.pep
KLTKNPNLRGQNNGATSFLYFLLSSFRHQLSLEKNGLVLRQNTFPEDFKFSELSHVNHRSRILLGFGYSWLKGLLYEKKTGLWFFTPTLVIALTCLPLTLLLKKKIKIGVVSCAFQIFVIVQKFQTNLHYF

SEQ ID NO: 117578 - protein, 202 aa, Gossypium hirsutum
  unsure (1)..(202): unsure at all Xaa locations
  Clone ID: AI725633.1.pep
EDMGNFYSAGRDPLFYAHHGNVDRMWNIWKTLPGKKRRDFDEKDWLNSSFLFYDENANMVRVKVRDCLDSKTLGYDYQSVDIPWLRSKPTPRRRRPGVGQGQDQGQDVXXXRKGKNRRGFPIXLDKVXVPIEIPRAXKPXKQQXNXKFWVLQTLHLDRIDSVQFYVSXXDDEDDDNPGXPEKSDSVGSFPNIPPGDCPSESM

SEQ ID NO: 117579 - protein, 80 aa, Gossypium hirsutum
  unsure (1)..(80): unsure at all Xaa locations
  Clone ID: AI725630.1.pep
PDFRGPHNPDTPFGGGRRVCPGITFAVAGGEYVLXNLLXWFDWKLPELRRCEELDQGDNMVLLFGRKYPFHLYPMLHSFS

SEQ ID NO: 117580 - protein, 65 aa, Gossypium hirsutum
  Clone ID: AI725616.1.pep
ENAASALLQLCLNSSKFCTLVLQEGAIPSLVALSQSGTPRAKEKAQQLLSHFRNQREGATGKGRM

SEQ ID NO: 117581 - protein, 231 aa, Gossypium hirsutum
  Clone ID: AI725600.1.pep
GEAGGTRSGQGSNPTGPSGDAEDHTPGGEDREGGTTREHKPAAEASGTPRRREGPGGQAEGNGQRAGNRGGEEEGHAPREGRQRGQKRGSTGAGTTRRAGERDEQRDKSGEREDREGGTERAAKPRENTGTAHEPGTRETGAAGAERRRPTSPPGTRTRARAHPTPRRPEPGGPKKGRRRKEQPRGLPPLLFLLLLFFFFFFFFIFFFFSSTSICFSKTLTNRKKMSSYGG

SEQ ID NO: 117582 - protein, 96 aa, Gossypium hirsutum
  Clone ID: AI725570.1.pep
TVKNLPNPTVKHLKKKVVENGHPISVFLNSINEIKNGLWRSTIPTIKTGHFQSFQRRIFHPERISFSFHTLNSHYMRCSIPFSRNELELTTLELPC

SEQ ID NO: 117583 - protein, 135 aa, Gossypium hirsutum
  Clone ID: AI725476.1.pep
FSLIFEFEFVYLINRGGRVLALKAAMEAIARKKVEEGYDCSICLEKFKEEEEGSEMPCKHVFHSDCVEKWLRINRSCPVCRFVMPGEEGESGGGEGSNLGILGSGNQEIVQSVVRVSLANLIALAMTASGLRSEQ

SEQ ID NO: 117584 - protein, 93 aa, Gossypium hirsutum
  unsure (1)..(93): unsure at all Xaa locations
  Clone ID: AI725460.1.pep
GRLKEEQSMEAFRSALDDCDLXKVGYEGQWFTWEHGRLSSNNIRKRSDRRVSIPGWNDLFPTYSLKHCGHSISDHCPLLLNTCSGMASQGNLY

SEQ ID NO: 117585 - protein, 195 aa, Gossypium hirsutum
  unsure (1)..(195): unsure at all Xaa locations
  Clone ID: AI725459.1.pep
SKRGVSGPVPGAPTIQIAPSVMQARSIRWNLTASGPRPNPQGSYHYGLITPSRTIMLSNSAPYINGKQRYAVNGVSYVPADTPLKIADYFKIPGVFNLGSIPTWPPSGNNAYFQTSVMAANFREYVEIVFQNWEDTVQSWHIDGYSFFVVGMNGGQWTPASRSSYNLRDTVARCTTQVYPXSWTAIYMALDNVGM

SEQ ID NO: 117586 - protein, 197 aa, Gossypium hirsutum
  Clone ID: AI725458.1.pep
VHYVGTSTHNRQAKVRVHGWDPVAVASFHFHDCQVPPFASPPPNPNAAIKFPSHLQPCFDACHHLRKPVTELLRMLSLQAKKVVIIHDSMMGSVVQDVGSIPSTESYAFHTVSAFSLFFYLWESAGKPQVNAEMLGENDVPSLEGCFTEDFLEFIALQHRYLNVTSGSIYNTSEVIEGTYVELLRQHMKEKQHWALG

SEQ ID NO: 117587 - protein, 81 aa, Gossypium hirsutum
  Clone ID: AI725453.1.pep
IEGQSPLRILVSLSILFIFVSLILLKRMIFSSIVLNSFSSIMIDGRMGIYGYTTEIQALFFYGIEMCFINAEARCRRQIMH

SEQ ID NO: 117588 - protein, 196 aa, Gossypium hirsutum
  unsure (1)..(196): unsure at all Xaa locations
  Clone ID: AI725447.1.pep
CERELSPSQFEAHAGMADRRQPYRHVRTSNGLTLHDIALSLSNGQRITTDIGDDMCSICGDSGDLLFCHECCQAVHPACLNLGHLPEGDWHCANCADENGLGRKAVSGESSRIARPIVIRLTRVVKAPEFEIGGCAICREYDFSSTTFDDRTIIFCDQCEKEFHVGCLRDXGQCDLKEIPKDKWFCCDDCKRIYGA

SEQ ID NO: 117589 - protein, 88 aa, Gossypium hirsutum
  Clone ID: AI725435.1.pep
GTREFLSHSSSKLLVRSLSFLEKKERNKSHKPVSNAAKEKAFKGVLAQRRSNIQGNRFPFTAEASRKAAVAPLRSGAFNGSRAAECLI

SEQ ID NO: 117590 - protein, 212 aa, Gossypium hirsutum
  Clone ID: AI725562.1.pep
KVSECMHQSTELLQRRTSDGGESALELIAEALKISMYSEKLLEMKAEALFILHKYEEVIQLCEKTFDSAEKNSLSFDSNGQIANLDSSSFSKDLTFKVWRCRMIFNSYFHLGKLEEAIAFLEKKEELQSSMYRDGSNSLKSSIPLAATVRELLSHKAAGNKAFQLGRHLEAVEHYTAALSGNMESRPFSAICFCNRAAAYKALGQITDAIAD

SEQ ID NO: 117591 - protein, 103 aa, Gossypium hirsutum
  Clone ID: AI725555.1.pep
NLNSYRYNGLVHKKSVGIVPAADKKGFTVVYKKAKASHKPAKATIKRTLKSGPRRSLTKLRRLIHANHYRRDLLKAALRRASAVLKSQKKPVTSRKARAKKAE

SEQ ID NO: 117592 - protein, 210 aa, Gossypium hirsutum
  unsure (1)..(210): unsure at all Xaa locations
  Clone ID: AI725517.1.pep
GFGAKIYRRLGIYLQSSCIISCSFAILISILWFFTEPILIFLQQDAEISKTAALYIKYLIPGLFAYGLVQNILRFLQSQSILMPLVWFSVLPLGLHLGIVYALVNWTDLGFKGAPLAASISLWISLVLLSSYVVLAQKFEETWPGLSSESFRLVFANLKLAIPSAAMVCLEYWAFELLLLLAGLMPNSXVTTSLIAMCVNTESIAYMITY

SEQ ID NO: 117593 - protein, 209 aa, Gossypium hirsutum
  unsure (1)..(209): unsure at all Xaa locations
  Clone ID: AI725500.1.pep
NKLRAMANNAQEQIRSQRNQESYLVQLAGRTTPKGLHCLSMQLTAEYFFLQPEDRQFPNQEKLIDPDLYHYSVFSDNILACAVVVNSTISSAKEPEKIVFHVVTDFLNLPSISMWFLLNPPGKATIRVQCIXDFDWLSTKYISTLAEQKSSDPRYTSVLNHLRFYLPDIFPALNKIVHLDHDIVLPKDLTEIWSVDLNGKINAALEKFS

SEQ ID NO: 117594 - protein, 172 aa, Gossypium hirsutum
  unsure (1)..(172): unsure at all Xaa locations
  Clone ID: AI725385.1.pep
TRNKVASFVTLLVIIAVNLAVGILPHVDNFAHIGGFLTGFLLGFVFLIRPQFGWVSQRYAPPGHSSSARPKFKKYQCILWAVSLILVIVGLSLGLVMLLRGVNANDHCSWCHYLSCVPTSRWSCNTKPAYCSSTQLSSQVNVTWLHNGKDHTYFLAGXTSSKIQNLCSSQCS

SEQ ID NO: 117595 - protein, 183 aa, Gossypium hirsutum
  Clone ID: AI725376.1.pep
IYTRPRMCRRFSMKFLTTEAYGMMAATFSLDCRLSTDVLITGLLLVAVPVAACGGSFPAAGVVVSLLIGWFPFFCTLRVFACFFSFRRPVLGCAAVPRLPGGGVVRVFSIGRSSCRVCFAVGACGSLLFVGCSLRCFFYYSSSRVAWPGWSSARPLLVSCVLLWCGGPFLSVGACDLGLFAAA

SEQ ID NO: 117596 - protein, 84 aa, Gossypium hirsutum
  unsure (1)..(84): unsure at all Xaa locations
  Clone ID: AI725365.1.pep
MASSMSLKLEFVVVXCMVVGEPLRLGALTXGQDRNSLPPSMNYFTCRAAGAVTPSCRNGIKSLNSAAQKTPERKPACTCFRNAV
